(19) United States
(12) Patent Application Publication
(10) Pub. No.: US 2012/0245216 A1
(43) Pub. Date: Sep. 27, 2012

(54) COMPOSITIONS AND METHODS FOR TREATMENT OF NEUROPATHIC PAIN

(75) Inventors: Lei Yu, Belle Mead, NJ (US); Ning Guo, Shanghai (CN); Yu-Qui Zhang, Shanghai (CN); Zhi-Qi Zhao, Shanghai (CN); Naihe Jing, Shanghai (CN)

(73) Assignee: RUTGERS, THE STATE UNIVERSITY OF NEW JERSEY, New Brunswick, NJ (US)

(21) Appl. No.: 13/393,399

(22) PCT Filed: Sep. 2, 2010
(86) PCT No.: PCT/US10/47657

§ 371 Date: Jun. 4, 2012

(30) Foreign Application Priority Data
Sep. 2, 2009 (US) 61239065

(51) Int. Cl. A61K 31/7088; C12Q 1/68; G01N 33/68; G01N 33/53; A61P 29/00; A61P 25/00

(52) U.S. Cl. 514/44 A; 436/86; 436/501; 435/7.1; 435/6.1; 435/6.13

(57) ABSTRACT

The present invention relates to compounds, compositions, methods, systems and kits for treating neuropathic pain regulated by SIP30. The present invention provides SIP30 antagonists for the treatment of neuropathic pain.

### CROSS-REFERENCE TO RELATED APPLICATIONS

[0001] This application claims priority under 35 U.S.C. §119(e) to U.S. Provisional Patent Application Ser. No. 61/239,065 filed on Sep. 2, 2009, which is hereby incorporated by reference in its entirety for all purposes.

### STATEMENT REGARDING FEDERALLY FUNDED RESEARCH

[0002] The Research leading to the present invention was supported in part, by NIH Grant No. R01 DA013471. Accordingly, the U.S. Government has certain rights in this invention.

### FIELD OF THE INVENTION

[0003] The present invention relates to the treatment of neuropathic pain in a mammalian using SIP30 antagonists.

### BACKGROUND OF THE INVENTION

[0004] Neuropathic pain is a complex, chronic pain state that is generally accompanied by tissue injury. With neuropathic pain, the nerve fibers themselves might be damaged, dysfunctional, or injured. These damaged nerve fibers send incorrect signals to other pain centers. The clinical causes of neuropathic pain are widespread and include both trauma and disease. For example, traumatic nerve compression or crush and traumatic injury to the brain or spinal cord are common causes of neuropathic pain. Furthermore, most traumatic nerve injuries also cause the formation of neuromas, in which pain occurs as a result of aberrant nerve regeneration. In addition, cancer-related neuropathic pain is caused when tumor growth painfully compresses adjacent nerves, brain or spinal cord. Neuropathic pain is associated with diseases such as diabetes or alcoholism.

[0005] Unfortunately, the available drug therapies for neuropathic pain often do not provide the patients in need of such treatment the adequate pain relief. In addition, current therapies have serious side-effects including, for example, cognitive changes, sedation, nausea and, in the case of narcotic drugs, addiction. Many patients suffering from neuropathic pain are elderly or have other medical conditions that particularly limit their tolerance of the side-effects associated with available drug therapy. A number of anti-inflammatory, anxiolytic, narcotic and even anti-convulsants are currently used by the practitioners to treat neuropathic pain, but with limited success.

[0006] The inadequacy of current therapy in relieving neuropathic pain calls for new compositions and methodologies of addressing the physical and social needs of the patient suffering from such condition. Methods of alleviating neuropathic pain would improve the quality of life for many people suffering from pain due to trauma or disease.

### SUMMARY OF THE INVENTION

[0007] The present invention fills the foregoing need by providing compounds, compositions, methods and systems for treating neuropathic pain regulated by SIP30. Applicants have surprisingly found that SIP30 antagonists are effective in treating neuropathic pain. The present invention also provides a screening method comprising: providing a sample containing at least a portion of an SIP30 polypeptide; adding a test compound to at least a first portion of the sample; comparing at least one parameter from at least the first portion of the sample with the at least one parameter from at least a second portion of the sample, wherein at least the second portion of the sample does not include the test compound. Applicants invention also process of determining a substance for its ability to interact with SIP30-like molecule protein comprising: a) providing a SIP30-like molecule polypeptide comprising the contiguous amino acid sequence of any from the group of SEQ ID B1 through SEQ ID B130; and b) testing the ability of said substance to interact with a SIP30-like molecule.

### BRIEF DESCRIPTION OF THE DRAWINGS

[0008] FIG. 1. illustrates rapid onset of thermal hyperalgesia and mechanical allodynia in rats receiving CCI surgery. Time courses for the development of mechanical allodynia (A) and thermal hyperalgesia (B) following chronic constriction injury of sciatic nerve were shown. p<0.05 vs. non-CCI injury paw.

[0009] FIG. 2. illustrates amino acid sequence alignment of mammalian SIP30 orthologues shows high degree of sequence homology, implicating similar function. Amino acid sequences of all mammalian SIP30 available in public domain are aligned. Gaps in alignment are shown as blank space. Amino acid residue identity with that of the corresponding human SIP30 sequence is indicated by a dash (-). Underline: putative coiled-coil domain. The common name, the Latin name, and the 3 letter abbreviation of each species are as following: Human—Homo sapiens—Hsa, Chimpanzee—Pan troglodytes—Ptr, Rhesus monkey—Macaca Mulatta—Mml, Dog—Canis lupus familiaris—Cfa, Pig—Sus scrofa—Ssc, Cow—Bos taurus—Bta, Mouse—Mus musculus—Mmu, and Rat—Rattus Norvegicus—Rno.

[0010] FIG. 3. illustrates expression pattern of SIP30 in normal rats. (A) Northern blot analysis of SIP30 expression in various rat tissues. The 2 kb mRNA band of SIP30 was marked with an arrow, and 18S ribosomal RNA was used as an internal control for sample loading. Source of tissue for RNA was indicated across the top of the gel for each lane. (B) SIP30 expression in the DRG. Immunological staining using antibodies against SIP30 (a), IB4 (b), and CGRP (c). Pair-wise superimposed composite images are shown as follows: SIP30 with IB4 (d), SIP30 with CGRP (e), and IB4 with CGRP (f). White arrowheads mark the cells with double staining. (C) SIP30 expression in the spinal cord. Immunological staining using antibodies against SIP30 (a), substance P (b), and CGRP (c). Superimposed composite images are shown as follows: SIP30 with substance P (d), SIP30 with CGRP (e), and triple composite of SIP30 with substance P and CGRP (f).

[0011] FIG. 4. illustrates SIP30 was up-regulated during CCI. (A) SIP30 mRNA levels in spinal cord (upper panel) and DRG (lower panel). Real-time PCR amplification results for SIP30 mRNA are shown relative to the mean levels in normal animals. Spinal cord tissues from rats receiving no surgery (normal), sham-CCI surgery (sham), or CCI surgery (3 days and 7 days post surgery, respectively) were collected, and RNA was isolated from the ipsilateral and contralateral side of the sham or CCI surgery for real-time PCR analysis. Significant difference (p<0.05 vs. normal or sham group) was observed in the ipsilateral but not contralateral spinal cord for both day 3 and day 7 after CCI surgery. No significant difference was observed in DRG. (B) Western blot analysis of SIP30 protein levels in the spinal cord. Spinal cord tissues from rats receiving sham or CCI surgery (3 days post surgery) were collected, and protein was isolated from the ipsilateral and contralateral side of the sham or CCI surgery for Western blot analysis. Top panel, representative Western blots of SIP30 protein. β-Actin was used as the internal control. Bottom panel, quantitative results of SIP30 protein. significant difference (p<0.05 vs. sham group) for the ipsilateral side of the spinal cord. (C) Western blot analysis of SIP30 protein levels in DRG. DRG tissues from rats receiving sham or CCI surgery (3 days post surgery) were collected, and protein was isolated from the ipsilateral and contralateral side of the sham or CCI surgery for Western blot analysis. Top panel, representative Western blots of SIP30 protein. β-Actin was used as the internal control. Bottom panel, quantitative results of SIP30 protein. No significant difference was observed on either ipsilateral or contralateral side of DRG. (D) SIP30 protein level was elevated in the ipsilateral side of spinal cord dorsal horn after CCI. (a) Immunofluorescence shows basal expression of SIP30-IR cells in naïve rats; (b & b′) Immunofluorescence indicate an increase in SIP30-IR cells in the dorsal horn on the ipsilateral (CCI) side (b, 5×; b′, 10×) (c) Quantification of SIP30 expression level, as indicated by the number of SIP30-IR cells (per 30 μm section) in the superficial (laminae I-II) and deep (laminae IV-V) dorsal horn. p<0.05; ANOVA, compared to control (n=5). (E) SIP30 localization in CCI spinal cord. (a) SIP30 (red) is co-localized with NeuN (green), a neuronal marker, in the spinal dorsal horn, 3 days after CCI (20×). (b) Enlarged image of boxed area in (a) as superimposed image (left panel) or separate images (right top and bottom panels) (40×). (c) Double immunofluorescence staining shows the SIP30 (red) is not co-localized with GFAP (green) in the dorsal horn 3 days after CCI. (d) Double immunofluorescence staining shows the SIP30 (red) is not co-localized with OX-42 (green) in the dorsal horn 3 days after CCI. SIP30 did not show overlap staining with either GFAP or OX-42.

[0012] FIG. 5. illustrates SIP30 participates in the regulation of development and maintenance of peripheral nerve injury-induced neuropathic pain. (A) Following the intrathecal injection of SIP30 antisense oligonucleotide (AS ODN) for 4 days (from day 0 to day 3 post-CCI), the development of mechanical allodynia (a) and thermal hyperalgesia (b) was reduced in ipsilateral paw to CCI (“Ipsi.”), whereas NS and MM ODN had no effect. p<0.05 vs. either NS or MM group. (c, d) No change was seen in contralateral paw (“Cont.”) after the same treatment. (B) Intrathecal injection of a second SIP30 AS ODN (SIP30 ASII, directed towards nucleotides 143-162 of the coding region of the SIP30 gene) for 4 days (from day 0 to day 3 post-CCI), the development of mechanical allodynia (a) and thermal hyperalgesia (b) was reduced in ipsilateral paw to CCI, but random oligonucleotide (RD ODN) had no effect. p<0.05, p<0.01 vs. RD group. (c, d) No change was seen in contralateral paw after the same treatment. (C) After mechanical allodynia and thermal hyperalgesia were developed, intrathecal injection of SIP30 AS ODN for 4 days (from day 3 to day 7 post-CCI) significantly inhibited both mechanical allodynia and thermal hyperalgesia in the ipsilateral paw to CCI, but NS and MM ODN had no effect p<0.05 vs. either NS or MM group. (c, d) No change was seen in contralateral paw after the same treatment. (D) In naïve rats, intrathecal injection of SIP30 AS ODN for 4 days did not affect the basal responses to Von Frey (a) or thermal stimuli (b) in both paws.

[0013] FIG. 6. illustrates anti-SIP30 antisense oligonucleotide knock down of SIP30 and SNAP25 levels. (A) SIP30 mRNA was increased after CCI, and the increase was reduced by antisense oligonucleotide (ODN). After four times of intrathecal administration of SIP30 antisense (AS) or missense (MM) ODN, rats were sacrificed and the lumbar spinal cords were dissected at six hours after the last injection. Real-time PCR amplification for SIP30 mRNA showed a significant decrease in ipsilateral spinal cord in CCI rats receiving SIP30 AS ODN compared with animals receiving MM ODN (p<0.05). The dotted line indicates mRNA level in sham CCI animals. (B) Western blot for SIP30 protein indicated a significant decrease in ipsilateral spinal cord in CCI rats receiving SIP30 AS ODN compared with animals receiving MM ODN or NS. Top panel, representative Western blots of SIP30 protein. β-Actin was used as the internal control. Bottom panel, quantitative results of SIP30 protein. The dotted line indicates protein level in sham ones. significant difference from NS or MM (p<0.05). Abbreviation: NS, normal saline; AS ODN, antisense oligodeoxynucleotides; MM, missense; day (0-3), rats were injected intrathecally with AS, MM, or NS from day 0 (6 hrs before CCI operation) to day 3 post-CCI; day (4-7), rats were injected intrathecally with AS, MM, or NS from day 4 to day 7 post-CCI. (C) Real-time PCR amplification for SNAP25 mRNA showed a significant increase in ipsilateral spinal cord after CCI operation. p<0.05 vs. sham group. Intrathecal injection of SIP30 AS ODN every 24 hours for 4 times caused a trend to decrease in SNAP25 mRNA in ipsilateral spinal cord of CCI rats, although that did not reach statistical significance. (D) Real-time PCR amplification for PSD95 mRNA showed a significant increase in ipsilateral spinal cord after CCI operation. p<0.05 vs. sham group. Intrathecal injection of SIP30 AS ODN every 24 hours for 4 times did not affect PSD95 mRNA levels.

[0014] FIG. 7. Mice in both SIP30 groups A and B provide significant change in Paw Withdraw Threshold from control group of mice at testing days 4, 6, and 8 (*, p<0.05 significant difference compared to control).

### DETAILED DESCRIPTION OF THE INVENTION

[0015] To aid in the understanding of the invention, the following non-limiting definitions are provided:

[0016] The term “allodynia” refers to a painful response to a usually non-painful stimulus and can be either static or mechanical. The pathophysiology of allodynia is thought to differs from referred pain, but can occur in areas other than the one stimulated.

[0017] The term “gene” refers to a DNA sequence that comprises control and coding sequences necessary for the production of a polypeptide or its precursor. The polypeptide can be encoded by a full length coding sequence (either genomic DNA or cDNA) or by any portion of the coding sequence so long as the desired activity is retained. In some aspects, the term “gene” also refers to an mRNA sequence or a portion thereof that directly codes for a polypeptide or its precursor.

[0018] The term “transfection” refers to the uptake of foreign DNA by a cell. A cell has been “transfected” when exogenous (i.e., foreign) DNA has been introduced inside the cell membrane. Transfection can be either transient (i.e., the introduced DNA remains extrachromosomal and is diluted out during cell division) or stable (i.e., the introduced DNA integrates into the cell genome or is maintained as a stable episomal element).

[0019] The term “Co-transfection” refers to the simultaneous or sequential transfection of two or more vectors into a given cell.

[0020] The term “promoter element” or “promoter” refers to a DNA regulatory region capable of binding an RNA polymerase in a cell (e.g., directly or through other promoter-bound proteins or substances) and initiating transcription of a coding sequence. A promoter sequence is, in general, bounded at its 3′ terminus by the transcription initiation site and extends upstream (5′ direction) to include the minimum number of bases or elements necessary to initiate transcription at any level. Within the promoter sequence may be found a transcription initiation site (conveniently defined, for example, by mapping with nuclease Si), as well as protein binding domains (consensus sequences) responsible for the binding of RNA polymerase. The promoter may be operably associated with other expression control sequences, including enhancer and repressor sequences.

[0021] The term “in operable combination”, “in operable order” or “operably linked” refers to the linkage of nucleic acid sequences in such a manner that a nucleic acid molecule capable of directing the transcription of a given gene and/or the synthesis of a desired protein molecule is produced. The term also refers to the linkage of amino acid sequences in such a manner so that a functional protein is produced.

[0022] The term “vector” refers to a nucleic acid assembly capable of transferring gene sequences to target cells (e.g., viral vectors, non-viral vectors, particulate carriers, and liposomes). The term “expression vector” refers to a nucleic acid assembly containing a promoter which is capable of directing the expression of a sequence or gene of interest in a cell. Vectors typically contain nucleic acid sequences encoding selectable markers for selection of cells that have been transfected by the vector. Generally, “vector construct,” “expression vector,” and “gene transfer vector,” refer to any nucleic acid construct capable of directing the expression of a gene of interest and which can transfer gene sequences to target cells. Thus, the term includes cloning and expression vehicles, as well as viral vectors.

[0023] The term “antibody” refers to a whole antibody, both polyclonal and monoclonal, or a fragment thereof, for example a F(ab)₂, Fab, FV, VH or VK fragment, a single chain antibody, a multimeric monospecific antibody or fragment thereof, or a bi- or multi-specific antibody or fragment thereof. The term also includes humanized and chimeric antibodies.

[0024] The term “SIP30” refers to a nucleic acid sequence that encodes a 266 amino acid protein SNAP25 interacting protein of 30 kDa. SIP30 is expressed abundantly in nerve tissues and slightly in testis and kidney. The term “SIP30-related” refers to any of a nucleic acid sequence listed in SEQ ID A1 through SEQ ID A130.

[0025] The term “SIP30 antagonist” refers to any substance, compound and compositions, synthetic or natural, including but not limited to antisense nucleic acid sequences, siRNA, antibodies, small molecular entities, alone or in combination that can prevent, inhibit, reduce or neutralize the expression and activity of SIP30, directly or indirectly modulating the activity of neuropathic pain inducing intermediaries “NPII.”

[0026] The term “SNAREs” refers to one type of NPII, which is a soluble N-ethylmaleimide-sensitive factor attachment protein receptors, including but not limited to synaptosome-associated proteins of 25 kDa (SNAP25), syntaxins, and vesicle-associated membrane proteins (VAMP), which are essential for regulated exocytosis of synaptic vesicles in neurotransmission.

[0027] The term “treating” or “treatment” of a disease refers to executing a protocol, which may include administering one or more drugs to a patient (human or otherwise), in an effort to alleviate signs or symptoms of the disease. Alleviation can occur prior to signs or symptoms of the disease appearing, as well as after their appearance. Thus, “treating” or “treatment” includes “preventing” or “prevention” of disease. In addition, “treating” or “treatment” does not require complete alleviation of signs or symptoms, does not require a cure, and specifically includes protocols which have only a marginal effect on the patient.

[0028] The term “patient” refers to a biological system to which a treatment can be administered. A biological system can include, for example, an individual cell, a set of cells (e.g., a cell culture), an organ, a tissue, or a multi-cellular organism. A patient can refer to a human patient or a non-human patient.

[0029] The term “hyperalgeisa” refers to an increased sensitivity to pain, which may be caused by damage to nociceptors or peripheral nerves.

[0030] The present invention is directed to compounds, compositions, methods and systems for treating neuropathic pain regulated by SIP30. Applicants have surprisingly found that SIP30 antagonists are effective in treating neuropathic pain. Applicants have found that that SPI30 antagonists including but not limited to nucleotides, small interfering RNA (siRNA) molecules, natural or synthetic compounds that correspond to at least a portion of SPI30 nucleic acid sequence are effective in inhibiting the expression of SIP30, directly, or indirectly through modulating the activity of NPII and thereby providing a means for treating pain caused thereby.

[0031] In another aspect of the present invention, small molecules capable of altering the configuration of SIP30 dependent intermediary proteins, thereby antagonizing the expression of SIP30. In yet another embodiment, the antagonistic effect may be accomplished by siRNAs that have a specific substrate binding site which is complementary to one or more of the target nucleic acid regions or (i.e., able to base-pair with) a portion of a target RNA. Preferably, such complementarity is 100%, but can be less if desired, such as 91%, 92%, 93%, 94%, 95%, 96%, 97%, 98%, or 99%.

[0032] Accordingly, one aspect of the present invention provides the use of DNA fragments, peptides, compounds, compositions thereof in the effected area to antagonize the expression and/or activity of SIP30. Another aspect of the present invention is directed to synthetic or natural compounds that antagonize the activity of NPII. Yet another aspect of the invention is directed to implant depots to deliver a suitable molecule to the area of interest triggering neuropathic pain.

[0033] At least one aspect of the invention is directed to the nucleic acid molecules corresponding to at least a portion of a neuropathic pain inducing nucleic acid sequences capable of inhibiting expression of NPII or any related pain inducing cytokines in a cell.

[0034] In another aspect of the present invention allows those of ordinary skill in the art to employ design molecular entities, compositions and or other modes of treatment that would reduce neuropathic pain by inhibiting, neutralizing or minimizing the role of SIP30 in a neuropathic pain cascade.

[0035] In other aspects of the present invention, the inventors propose methods of treatment of pain for neuropathic pain conditions, including spinal cord-mediated pain, peripheral nerve damage related pain, herniated disc related pain, Carpel tunnel syndrome, multiple sclerosis, fibromyalgia, herpes zoster, HIV-related neuropathies, painful traumatic mononeuropathy, painful polyneuropathy (particularly due to diabetes), central pain syndromes (potentially caused by virtually any lesion at any level of the nervous system), post-surgical pain syndromes (eg, post-mastectomy syndrome, post-thoracotomy syndrome, phantom pain), and complex regional pain syndrome (reflex sympathetic dystrophy and causalgia.

[0036] Another aspect of the present invention is directed to an expression vector comprising at least one DNA sequence encoding a siRNA molecule corresponding to at least a portion of a SIP30 nucleic acid sequence capable of inhibiting expression pain intermediaries in a cell operably linked to a genetic control element capable of directing expression of said siRNA molecule in a host cell.

[0037] Another aspect of the present invention is directed to a method for treating a subject suffering from neuropathic pain comprising administering into said subject at least a compound selected from the group consisting of an antisense sequence, a siRNA molecule, a peptide, a small molecule that corresponds and antagonizes the activity of at least a portion of a SIP30 nucleic acid sequence and or a SIP30 protein.

[0038] Another aspect of the present invention is directed to a system for treating a patient suffering from neuropathic pain comprising at least one antisense or siRNA molecule, a peptide, a small molecule alone or in combination with each other or further in combination with other neuropathic pain therapies and modalities and finally a means for introducing said compounds to the desired tissue of the patient.

[0039] In a further aspect the candidate compounds including antisense, siRNA molecule that corresponds to at least a portion of a the SIP30 nucleic acid sequence can be introduced into the desired tissue by means of an injection, a pump or a depot.

[0040] In the practice of the invention, a depot implant is implanted in a subject at or near a target site. Non-limiting examples of such sites include an inflamed nerve, constricted nerve at a cerebral or a spinal site, or the surrounding soft tissue.

[0041] In another embodiment of the invention the siRNA depot implant is positioned in the affected areas. Additional embodiments of the invention provide for positioning the drug depot implant in the shoulder, hip, other joints or spine of a patient.

[0042] In one embodiment, a targeted delivery system of one or more SIP30 antagonist molecules conveniently employ a catheter. In another embodiment, the targeted delivery system employs a syringe.

[0043] In one method of the invention, the targeted delivery system comprises a drug depot implant system administered locally by insertion of a catheter at or near a target site, the catheter having a proximal end and a distal end, the distal end having an opening to deliver a SIP30 antagonist in situ, the proximal end being fluidly connected to a pharmaceutical delivery pump. For example, the proximal end of the catheter may deliver the molecule to within 10 cm of a target site, more particularly, to within 5 cm of the target site.

[0044] In the employment of an implant of the invention, the SIP30 antagonist may inhibit other pain intermediaries mediated by INF-α, IL-1, IL-6 and other pain inducing cytokines.

[0045] In another embodiment, the suitable compounds further comprises a modified release pharmaceutical composition. The system can further comprise two or more combination of molecules. In still another embodiment, a catheter is provided rather than a depot. In this embodiment, a catheter has a proximal end and a distal end, the distal end having an opening to deliver a pharmaceutical in situ, the proximal end being fluidly connected to a pharmaceutical pump.

[0046] For the purposes of promoting an understanding of the principles of the invention, reference will be made to preferred embodiments and specific language will be used to describe the same. It will nevertheless be understood that no limitation of the scope of the invention is thereby intended, such alterations and further modifications of the invention, and such further applications of the principles of the invention as illustrated herein, being contemplated as would normally occur to one skilled in the art to which the invention relates.

[0047] The present invention is more specifically drawn to compositions and methods for the treatment of pain arising from inventors' discovery that inhibition of SIP30 results in reduction of pain of a neuropathic pain nature. In certain preferred embodiments, a SIP30 antagonist or a related molecule can be administered directly to a nerve or a tissue position near a nerve centrally or locally that is responsible of origination of neuropathic pain.

[0048] Based on the present invention, one skilled in the art can infer that molecular inhibition of SIP30 can also result in reduction of pain of a neuropathic pain nature. Accordingly, the treatment of pain in this invention applies to neuropathic pain conditions, including spinal cord-mediated pain, compression injuries, peripheral nerve damage related pain, herniated disc related pain, Carpel tunnel syndrome, multiple sclerosis, fibromyalgia, herpes zoster, HIV-related neuropathies, painful traumatic mononeuropathy, painful polyneuropathy (particularly due to diabetes), central pain syndromes (potentially caused by virtually any lesion at any level of the nervous system), post-surgical pain syndromes (eg, post-mastectomy syndrome, post-thoracotomy syndrome, phantom pain), and complex regional pain syndrome (reflex sympathetic dystrophy and causalgia. In certain embodiments, a substance to antagonize SIP30 or a related molecule can be administered directly to a nerve or a tissue position near a nerve.

[0049] The present invention is described more fully by way of the following non-limiting example. All references cited are hereby incorporated by reference in their entirety herein. The data in the following example showed that SIP30 is a molecular component for the development and maintenance of neuropathic pain, and that antagonizing SIP30 by antisense oligonucleotides produce pain relief in the rat's chronic constriction injury (“CCI”) model of neuropathic pain. The inventors also showed that mammalian SIP30 sequences are highly related. Thus, this invention teaches the compositions and methods for treating pain of a neuropathic pain origin by antagonizing SIP30 in any mammalian species. Based on this invention, those skilled in the art can readily deduce that any known method for antagonism, including antagonizing the SIP30, the product of mRNA such as with oligonucleotides, or antagonizing the SIP30 protein with chemical compounds and/or antibodies, will lead to the pain-relieving effect disclosed in this invention.

[0050] Further, those skilled in the art can readily deduce that neuropathic pain relief can be achieved by antagonizing a molecule related to SIP30; such a molecule can be a synaptic vesicle-related protein, and/or a molecule generally known as a SNAREs (Ungar and Hughson, 2003; Brunger, 2005).

[0051] The present invention provides an advantageous strategy for reducing any type of pain associated with any medical condition or caused by any procedure that could induce or express any portion of the SIP30. SIP30 is abundantly available in certain mammalian tissues. In brain, SIP30 is highly expressed in the inferior and superior colliculi, which contain important relay nuclei of the auditory and visual systems. GST-pull-down and immunoprecipitation assays showed direct binding of SIP30 to SNAP25. Although SIP30 does not directly interact with syntaxin based on pull-down assays, syntaxin does co-immunoprecipitate with SIP30 suggesting that syntaxin is indirectly associated with SIP30, perhaps through SNAP25.

[0052] By way of example, the inventors of the present invention disclose compounds and methods for reducing neuropathic pain associated with peripheral nerve injury.

[0053] In at least one aspect of the invention localized delivery of an SIP30 antagonist will prevent, reduce or at least minimize the majority of negative side effects of systemic agents. In at least one embodiment, local delivery of SIP30 antagonist molecules can be used to achieve high concentrations of the SIP30 antagonist at the intended target site while using a low dose and minimizing risk of systemic side effects.

[0054] In addition, another aspect of the present invention embrace protracted release of the agent for long term relief of neuropathic pain by incorporating SIP30 antagonists alone or in combination with suitable anticonvulsant, anti-inflammatory, compounds targeting different ion channels, opioids, Na channel blockers, antidepressents, or anesthetic, more specifically, including but not limited to Mexiletine, Lidocaine, Tramadol, Morphine, Alfentanil, Ketamine, Methylprednisone, Adenosine, Glycine antagonists, Desipramine, Venlafaxine, gabapentin, into a biodegradable depot implant that will act as a depot for localized or central release of the agent.

[0055] Another aspect of the present invention provide reagents, methods and systems for inhibiting expression of NPII or cytokines responsible for inducing neuropathic pain in a cell using antisense, or siRNA molecules that correspond to at least a portion of SIP30 cytokine nucleic acid sequence of SNAREs. Applicants have found that SIP30 antagonists targeted to NPII and related cytokine mRNA are effective in inhibiting expression of neuropathic pain inducing cytokine, thereby providing improved methods for treating pain in a subject. The methods of this aspect of the present invention can be performed utilizing routine techniques in the field of molecular biology. Basic texts disclosing general molecular biology methods include Sambrook et al., Molecular Cloning, A Laboratory Manual (3d ed. 2001) and Ausubel et al., Current Protocols in Molecular Biology (1994). More specialized texts relevant to the present invention include Sohail, Gene Silencing by RNA Interference: Technology and Application (2004).

[0056] In one broad aspect, the invention relates to isolated nucleic acid molecules comprising a nucleic acid sequence encoding complementary to nucleotides 11-31 of the coding region of the SNAP25 inteacting protein (GenBank accession number BC063144). In a specific aspect, the isolated nucleic acid molecule encodes proteins that neutralizes the up-regulation of SIP30 associated with neuropathic pain phenomenon. In addition, the invention is directed to vectors comprising these nucleic acid molecules, as well as host cells comprising the vectors. In another specific aspect, the invention relates to the proteins themselves.

[0057] In a second broad aspect, the invention relates to antibody that is specific for SIP30 proteins and SNAREs including rat SNAP and all homologous or orthologous sequences for mammalian SIP30 as shown in FIG. 2. In one specific aspect, the antibody is a polyclonal antibody. In another specific aspect, the antibody is a monoclonal antibody.

[0058] In a third broad aspect, the invention relates to method of reducing the upregulation of SIP30 locally or centrally in specific neuropathic pain originating tissues, for example ipsilateral side of the spinal cord. In one specific aspect, the isolated nucleic acid molecule is in a vector, which may be a plasmid or a virus, such as adenovirus or retrovirus. The transfect ion may occur ex vivo or in vivo by direct injection of the isolated nucleic acid molecule. In an alternative approach, direct administration of the SIP30 antagonist is possible.

[0059] In another broad aspect of the invention, the inventors discover a process for determining suitable SIP30 antagonists for their ability to interact with SIP30-like molecule protein, including SNAREs comprising: a) providing a SIP30-like molecule polypeptide comprising the contiguous amino acid sequence of any from the group of SEQ. ID. B1 through SEQ. ID. B130; and b) testing the ability of said substance to interact with a SIP30-like molecule. In a more specific feature of this embodiment the step of testing the ability of said substance to interact with a SIP30-like molecule involves determining the interaction affinity of said substance to a SIP30-like molecule.

[0060] A yet another embodiment, the inventors disclose a process for determining a substance's ability to interact with a SIP30-like molecule comprising: a) providing a recombinant SIP30-like molecule polypeptide encoded by a nucleic acid sequence comprising at least 35 contiguous nucleotides of any from the group of SEQ. ID. A1 through SEQ. ID. A130; b) contacting said substance with said recombinant SIP30-like molecule polypeptide; and c) detecting the ability of said substance to bind to said recombinant SIP30-like molecule polypeptide. In this aspect of the invention, the nucleic acid sequence comprises at least 45 contiguous nucleotides of any from the group of SEQ. ID. A1 through SEQ. ID. A130. In yet another aspect of this embodiment, the nucleic acid sequence comprises at least 50, 75, or 100 contiguous nucleotides of any from the group of SEQ. ID. A1 through SEQ. ID. A130.

[0061] Another aspect of the invention is directed to processes for detecting the ability of suitable SIP30 antagonists to interact with a SNAREs and SIP30 molecule polypeptide by measuring a) the ability of said recombinant SIP30-like molecule polypeptide to interact with said substance; b) the ability of said substance to activate ion channels in a cell membrane; or c) modulation of channels in the cell membrane of part b), specifically, wherein the recombinant SIP30-like molecule polypeptide is chimeric.

[0062] Another aspect of the present invention is directed to process for determining a substance's ability to bind to a SIP30-like molecule comprising: a) expressing in cells a recombinant SIP30 polypeptide encoded by a nucleic acid sequence comprising at least 25 contiguous bases of any from the group of SEQ ID A1 through SEQ ID A130; b) contacting said substance with said recombinant SIP30-like molecule polypeptide; and c) detecting the ability of said substance to interact with said recombinant SIP30-like molecule polypeptide. In this aspect of the invention, the nucleic acid sequence can comprise at least 40, 45, 50, 75 or 100 contiguous nucleotides of any from the group of SEQ ID A1 through SEQ ID A130.

[0063] A preferred embodiment the present invention provides a an antisense oligodeoxynucleotide complementary to nucleotide 11031 of the coding region of the rat SIP30. Another aspect of the present invention is directed to siRNA molecule corresponding to at least a portion of a SIP30 nucleic acid sequence, mRNA encoding SNAREs, including SNAP25 capable of inhibiting expression of said proteins or cytokines in a cell responsible for neuropathic phenomenon.

[0064] siRNAs of the present invention are typically short (19-29 nucleotides), double-stranded RNA molecules that cause sequence-specific degradation of complementary target mRNA known as RNA interference (RNAi) (Bass, Nature 411:428 (2001)). Accordingly, in some embodiments, the siRNA molecules comprise a double-stranded structure comprising a sense strand and an antisense strand, wherein the antisense strand comprises a nucleotide sequence that is complementary to at least a portion of a peptide, protein or cytokine nucleic acid sequence and the sense strand comprises a nucleotide sequence that is complementary to at least a portion of the nucleotide sequence of said antisense region, and wherein the sense strand and the antisense strand each comprise about 19-29 nucleotides.

[0065] The siRNA molecules targeted to NPII, or pain inducing cytokines or proteins can be designed based on criteria well known in the art (e.g., Elbashir et al., EMBO J. 20:6877 (2001)). For example, the target segment of the target mRNA preferably should begin with AA (most preferred), TA, GA, or CA; the GC ratio of the siRNA molecule preferably should be 45-55%; the siRNA molecule preferably should not contain three of the same nucleotides in a row; the siRNA molecule preferably should not contain seven mixed G/Cs in a row; the siRNA molecule preferably should comprise two nucleotide overhangs (preferably TT) at each 3′ terminus; the target segment preferably should be in the ORF (open reading frame) region of the target mRNA and preferably should be at least 75 bp after the initiation ATG and at least 75 bp before the stop codon; and the target segment preferably should not contain more than 16-17 contiguous base pairs of homology to other coding sequences. Based on some or all of these criteria, preferred pain inducing cytokine siRNA target sequences can be identified.

[0066] Accordingly, another aspect of the present invention provides a method for inhibiting expression of a SIP30 pain inducing protein or cytokine, or other intermediaries in a cell comprising introducing into a cell at least one antisence or siRNA molecule that corresponds to at least a portion of a pain inducing nucleic acid sequence. Although any cell can be targeted, the cell into which the such molecules should be introduced is preferably a central nervous system regions that at risk of SIP30 upregulation, more preferably a spinal cord or locally at areas that the pain inducing protein or cytokines manifest their presence. In preferred embodiments, the regions is from a subject suffering from an injury, preferably a human patient.

[0067] The compounds and molecules produced herein can be introduced into cells in vitro or ex vivo using techniques well-known in the art, including electroporation, calcium phosphate co-precipitation, microinjection, lipofection, polyfection, and conjugation to cell penetrating peptides (CPPB).

[0068] Alternatively, such molecules targeted to pain inducing cytokines can be introduced into cells in vivo by endogenous production from an expression vector(s) encoding the sense and antisense sequences.

[0069] Genetic control elements include a transcriptional promoter, and may also include transcription enhancers to elevate the level of mRNA expression, a sequence that encodes a suitable ribosome binding site, and sequences that terminate transcription. Suitable eukaryotic promoters include constitutive RNA polymerase II promoters (e.g., cytomegalovirus (CMV) promoter, the SV40 early promoter region, the promoter contained in the 3′ long terminal repeat of Rous sarcoma virus (RSV), the herpes thymidine kinase (TK) promoter, and the chicken beta-actin promoter), tissue-specific RNA polymerase II promoters, and RNA polymerase III promoters (e.g., U6, H1, 7SK and 7SL).

[0070] In some embodiments, the sense and antisense strands may be encoded by different expression vectors (i.e., co-transfected). In other embodiments, the sense and antisense strands of siRNA molecules are encoded by the same expression vector. The sense and antisense strands can be expressed separately from a single expression vector, using either convergent or divergent transcription.

[0071] Alternatively, the sense and antisense strands can be expressed together from a single expression vector in the form of a single hairpin RNA molecule, either as a short hairpin RNA (shRNA) molecule (e.g., Arts et al., Genome Res. 13:2325 (2003)) or a long hairpin RNA molecule (e.g., Paddison et al., Proc. Natl. Acad. Sci. USA 99:1443 (2002)).

[0072] Neuropathic Pain inducing intermediaries, cytokine polypeptide (or fragments thereof) can be detected and quantified using various well-known immunological assays, such as, e.g., enzyme-linked immunosorbent assay (ELISA), radio-immunoassay (RIA), immunoprecipitation, immunofluorescence, and Western blotting. Anti-pro-inflammatory cytokine anti-bodies (preferably anti-human pro-inflammatory cytokine) for use in immunological assays are commercially available from, e.g., EMD Biosciences (San Diego, Calif.), Upstate (Charlottes-ville, VA), Abcam (Cambridge, Mass.), Affinity Bioreagents (Golden, Colo.) and Novus Biologicals (Littleton, Colo.), or may be produced by methods well-known to those skilled in the art.

[0073] In another aspect, the invention provides a screening method comprising: providing a sample containing at least a portion of SIP30 and/or at least a portion of a SIP30 protein; adding a test compound to at least a first portion of the sample; and comparing at least one parameter from at least the first portion of the sample with the at least one parameter from at least a second portion of the sample, wherein at least the second portion of the sample does not include the test compound.

[0074] A magnitude of a difference between the at least one parameter from at least the first portion of the sample and the at least one parameter from at least the second portion of the sample is an indication of, inter alia, the test compound's ability to alter SIP30 expression, activity or up-regulation.

[0075] In another aspect, the invention provides a kit comprising at least a portion of SIP30 and/or at least the portion of SIP30 protein, and at least a quantity of a control compounds.

[0076] In yet another aspect, the invention provides a method for use in assessing the risk of developing post surgical neuropathic pain in a subject comprising detecting a test amount of a SIP30 gene product in a sample from the subject; and comparing the test amount with a normal amount of SIP30 gene product in a control sample, whereby a finding that the test amount is outside of the normal range for the SIP30 gene product provides a positive indication in the diagnosis of a risk to post surgical neuropathic pain.

[0077] The use of antisense or siRNA molecules alone or in combination with other anticonvulsants, anti-inflammatory agents, anesthetics, to inhibit cellular expression of neuropathic pain inducing cytokine finds utilities as methods for the treatment inflammation in subjects. Accordingly, another aspect of the present invention provides a method for treating a patient suffering from neuropathic pain comprising introducing into said patient at least an effective amount of SIP30 antagonist molecule that corresponds to at least a portion of a SIP 30 nucleic acid sequence. Such a method for treatment of inflammation can be performed using systems that provide for the delivery of such molecules targeted to the tissue of interest. Accordingly, another aspect of the present invention provides a means for introducing the effective amount of such formulations into the tissue of the patient. In preferred embodiments, the patient is human.

[0078] Numerous well-known methods exist for tissue gene delivery, such as for example, catheter, syringe or depot implant. A preferred delivery system includes a depot implant. A depot implant of the present invention comprises a physical structure to facilitate implantation and retention in a desired location of a subject. Drug depot implant may contain microspheres, the microspheres may further contain a isolated nucleic acids, a siRNA molecule that provides a concentration gradient for targeted delivery of the agent to the subject. In yet another aspect of the present invention, the microspheres are injected into the tissue of interest.

[0079] In another aspect of the invention those of ordinary skill will appreciate that different combinations of the products in form of immediate release or sustained-release formulations are also suitable for this invention. For example, the practitioner may formulate the at least one SIP30 antagonist as a combination of a gel and microspheres loaded with the at least one anticonvulsant, antidepressant, anti-inflammatory, opioid, or anesthetic wherein the combination of gel and microspheres are placed in the region of interest. In the practice of the invention, the administration is localized and sustained.

[0080] The reagents, methods and systems of the present invention are also useful for applications in many organs of the subject.

[0081] Specific embodiments according to the methods of the present invention will now be described in the following examples. Although the invention herein has been described with reference to particular embodiments, it is to be understood that these embodiments are merely illustrative of the principles and applications of the present invention. It is therefore to be understood that numerous modifications may be made to the illustrative embodiments and that other arrangements may be devised without departing from the spirit and scope of the present invention as defined by the following claims.

### EXAMPLES

### Example 1

### Antagonizing SIP30 to Suppress Development and Maintenance of Peripheral Nerve Injury-Induced Neuropathic Pain

### Materials and Methods

[0082] Experimental animals. Adult male Sprague-Dawley rats, 200-280 g, were housed two per cage with food and water available ad libitum, with a 12:12 h day/night cycle and at a constant room temperature.

[0083] Intrathecal implantation. An intrathecal catheter (PE-10 tube) was inserted through the gap between the L4 and L5 vertebrae and extended to the subarachniod space of the lumbar enlargement (L4 and L5 segments) under sodium pentobarbital (40 mg/kg, i.p.) anesthesia. The catheter was filled with sterile normal saline (approximately 4 ul), and the outer end was plugged. The cannulated rats were allowed to recover for 4 days and were housed individually. Rats that showed any neurological deficits resulting from the surgical procedure were excluded from the experiments.

[0084] Chronic constriction injury (CCI) of the sciatic nerve. Rats were deeply anesthetized with pentobarbital sodium (45 mg/kg i.p.) and the right sciatic nerve exposed at the mid-thigh level by blunt dissection of the biceps femoris. For CCI, four chromic gut (4-0) ligatures were tied loosely around the nerve ˜1 mm apart, proximal to its trifurcation, as described by Bennett and Xie (1988). For sham surgery, the sciatic nerve was isolated but not ligated. After CCI or sham surgery, the overlying muscles and skin were closed respectively in layers with 4-0 silk sutures and dusted with antibiotic power.

[0085] Antisense oligodeoxynucleotide (ODN) preparation and delivery. An antisense sequence (AS, 5′- TTT CTC CGC GTC CGC CAT GGT -3′) SEQ. ID No. B131, complementary to nucleotides 11-31 of the coding region of the rat SNAP25 interacting protein 30 (SIP30, GenBank accession number BC063144), and a corresponding mismatch sequence SEQ. ID. No. B132 (MM, 5′-TTT CCT CGC GTC CCG CAT GGT-3′) were synthesized and purified by Integrated DNA Technologies, Inc., Coralville, Iowa, USA).

[0086] All of the ODNs were screened against the GenBank Database using the BLAST algorithm to exclude non-specificity of the antisense ODNs and to show that missense ODNs did not match any registered nucleotide sequences. The ODNs were reconstituted in 0.9% normal saline (NS) before administration. The rats were injected intrathecally with NS (10 ul), AS (50 ug/10 ul), and MM (50 ug/10 ul), respectively, followed by 5 ul NS for flushing, every 24 hrs for 4 days [delivering protocol I: from day o (6 hrs before CCI operation) to day 3 post-CCI operation; delivering protocol II: from day 4 to day 7 post-CCI operation].

[0087] RNA extraction for real-time PCR analysis. Rats were sacrificed on the 3rd or 7th day after CCI or sham operation. In order to assess the development of neuropathic pain and effects of antisense, rats were tested for both mechanical allodynia and thermal hyperalgesia as described in 2.6 before sacrificed. The spinal cord from naïve, sham, or CCI rats treated with AS, MM, or NS was dissected and split into two halves, one ipsilateral and one contralateral to the CCI side. The DRG (L4-L6) from the same treatment animals were also dissected. A single sample of the ipsilateral or contra-lateral DRG was collected from two rats.

[0088] After dissection, all tissues were rapidly frozen in dry ice and stored at −80° C. until further processing. Frozen spinal cords were directly homogenized in 1 ml TRIZOL reagent (Invitrogen, Life Technologies, Carlsbad, Calif., USA). Total RNA was extracted following manufacturer's protocol with minor modifications. Briefly, following chloroform extraction, RNA was precipitated with isopropanol and the pellet washed two times in 70% ethanol. After air drying, RNA was re-suspended in ultrapure water. Both the quality and quantity of the total RNA were examined by gel electrophoresis and by A 260 measurements (Agilent 2001 Bioanalyzer, Palo Alto, Calif.). Extracted RNA was treated with DNase I (DNA-free, Ambion) to remove genomic DNA. cDNA was synthesized with random decamers using the Ambion RETROscript reverse transcription kit accord-ing to the manufacturer's instructions. Negative control reactions were run without RNA to test for contamination of reagents.

[0089] Real-time PCR. Real-time PCR analysis was performed on a Cepheid Smart Cycler. The threshold cycles (Ct) were calculated using the Smart Cycler Data Analysis Software 2.0 (Cepheid). The PCR reaction was performed in a final volume of 20 μl using LightCycler DNA Master SYBR Green I kit containing: 12.6 μl of PCR grade water, 2.4 μl of MgCl2 (25 mM), 2 μl of 10× LightCycler DNA Master SYBR Green I [Taq DNA polymerase, reaction buffer dNTP mix (with dUTP instead of dTTP), SYBR Green I dye, and 10 mM MgCl2], 2 μl of cDNA template, 0.5 μl of forward and reverse primer (100 ng/μl) respectively.

[0090] The amplification protocol included 150 sec at 95° C. to activate the Taq DNA polymerase, then 40 cycles of 10 sec denaturation at 95° C., 15 sec annealing at 58° C., and 20 sec extension at 72° C. In all cases, a linear relationship between the sample cDNA quantity and the Ct was observed first. Each sample was run in triplicates and Ct values were averaged from each reaction.

[0091] For controls, no-template controls were run in which water replaced template. Results of the RT-PCR analysis were expressed as Ct values, which were used to determine the amount of target gene mRNA in relation to the amount of reference gene mRNA. In this present study, β-actin was used as reference gene to normalize expression levels. The relative gene expression level was computed from the target and β-actin using the following formula (Livak and Schmittgen, 2001; Marvizon et al., 2002; Beltramo et al., 2003): mRNA relative expression=2−(Ct of target−Ct of β-actin). Primers were designed by Invitrogen Custom Primer Designer.

[0092] Von Frey hair test of mechanical sensitivity. The hind paw withdrawal threshold was determined using a calibrated series of von Frey hairs (Stoelting, Ill., USA) ranging from 0.6 to 18 g. Animals were placed individually into wire mesh-bottom cages, and allowed to acclimatize for ˜30 min. The series of von Frey hairs was applied to the central region of the plantar surface of the left hind paw in ascending order of force (0.6, 0.9, 1.3, 2.2, 4.8, 6, 7.2, 9, 13, and 18 g) with a single trial of up to 6 sec. The hair was applied only when the rat was stationary and standing on all four paws. A withdrawal response was considered valid only if the hind paw was completely removed from the mesh-bottom. When a withdrawal response was established, the paw was retested, starting with the next descending von Frey hair until no response occurred. A trial consisted of application of a von Frey hair to the hindpaw five times at 15 s intervals to each hindpaw. The hindpaw withdrawal threshold was defined as the lowest force that caused at least three withdrawals out of the five consecutive applications. Once the threshold was determined for the left hind paw, the same testing procedure was repeated on the right hind paw after 5 min.

[0093] Hargreave's test for hind paw thermal sensitivity. After acclimation to the test chamber, thermal hyperalgesia was assessed by measuring the latency of paw withdrawal in response to a radiant heat source. Rats were placed individually into Plexiglas cages on an elevated glass platform, under which a radiant heat source (model 336 combination unit, IITC/life Science Instruments, Woodland Hill, Calif., USA) was applied to the glabrous surface of the paw through the glass plate. The heat source was turned off when the rat lifted the foot, allowing the measurement of time from onset of radiant heat application to withdrawal of the rat's hind paw.

[0094] This time was defined as the hind paw withdrawal latency. The heat was maintained at a constant intensity, which produced a stable withdrawal latency of approximately 8-10 s in the absence of CCI. A 20 s cut-off was used to prevent tissue damage in the absence of a response. Rats were tested individually in groups of four, such that the stimulation was delivered once to the left hind paw (control) of each rat and then to the right hind paw (CCI) with a 5 min interval. This process was then repeated two more times, and three trials were averaged for each limb.

### Results

[0095] Identification of neuropathic pain in a rodent model

[0096] In an effort to uncover novel molecular components of signaling pathways that are involved in regulating neuropathic pain, the inventors utilized chronic constriction injury (CCI) as a rodent model of neuropathic pain (Bennett and Xie, 1988; Moalem et al., 2004; Xie et al., 2005), to search for differentially expressed genes in the spinal cord of the CCI rats. Since the inventors wished to identify genes that are involved in the development phase of the neuropathic pain, they first determined the time course of neuropathic pain development in the CCI model. Using S-D rats that had received unilateral CCI surgery, they measured hindpaw thermal and tactile nociceptive sensitivity, from 2-day post-CCI surgery.

[0097] As can be seen in FIG. 1, at 2-day post-CCI surgery, for the CCI hind paw compared with the control paw (i.e., no surgery), both thermal and tactile nociceptive sensitivity have greatly increased, to approaching almost maximum. These results are consistent with the previous studies (Khalil et al., 1999) that mechanical allodynia and thermal hyperalgesia developed within a few days following CCI. Based on this time course information for neuropathic pain development, the inventors chose post-CCI day 3 as the time point, and isolated RNA from the lumbar enlargement portion of the control and CCI animals to perform microarray analysis using a custom-constructed cDNA library microarray as previously described (Hou et al., 2004; Jin et al., 2005; Wang et al., 2005).

[0098] One of the cDNA clones that were identified in this process is SIP30, a molecule that has been previously reported that interacts with SNAP25 (Lee et al., 2002), which has been shown to be present in several areas of the rat brain (Lee et al., 2002), and its molecular function was hitherto unknown.

[0099] As shown in FIG. 2, SIP30 orthologues are present in several species, including chimpanzee, monkey, and several non-primate mammals. The sequence is highly homologous. Extensive search of GenBank and other public sequence databases indicated that SIP30 sequence is present in primates and other mammals.

[0100] SIP30 co-localizes with markers for small-diameter neurons—To evaluate SIP30 expression pattern in various CNS and peripheral tissues, Northern blot analysis was carried out, showing that SIP30 is mainly expressed in the CNS (FIG. 3). These results corroborate with the earlier report (Lee et al., 2002).

[0101] Next, the expression of SIP30 in the DRG was examined. Small-diameter DRG neurons are primarily nociceptors. They can be divided neurochemically into two populations: isolectinB4 (IB4)-positive nonpeptidergic neurons, and IB4-negative peptidergic neurons. The IB4 negative neurons express TrkA receptors for nerve growth factor (NGF), depend on NGF for survival, and contain neuropeptides including calcitonin gene-related peptide and substance P. The IB4 positive neuronal population expresses receptors for glial-derived neurotrophic factor (GDNF), neurturin, or artemin. The Isolectin B4-positive and -negative nociceptors are functionally distinct (Stucky and Lewin, 1999). It has been hypothesized that IB4-negative neurons specifically contribute to inflammatory pain and that IB4-positive neurons contribute to neuropathic pain (Mantyh and Hunt, 1998; Snider and McMahon, 1998; Breese et al., 2005).

[0102] SIP30 expression was examined together with IB4 and CGRP in normal adult rats DRG (L4-L5). SIP30 is expressed across small to medium diameter DRG neurons (FIG. 3). SIP30 displayed an overlapping pattern with IB4 and CGRP in some neurons but mainly co-expressed with CGRP (FIG. 3), suggesting a peptidergic nature.

[0103] SIP30 immunoreactivity was examined in the lumbar spinal cord, where it was found to be expressed in all lumbar levels and throughout all laminae. SIP30 immunoreactivity was particularly concentrated in the superficial dorsal horn lamina I and II (FIG. 3), and showed a strong co-expression pattern with nociception-related neuropeptides CGRP and substance P (FIG. 3). In addition, SIP30 immunostaining was present in cell bodies in laminae IV-VII as well as in motor neurons in the ventral horn.

[0104] Upregulation of SIP30 in the spinal cord following CCI—The change in SIP30 mRNA was measured by quantitative real-time PCR, in both spinal cord and DRG of either CCI or sham-operated rats. The expression levels of two other genes were used as reference points to normalize the amount of total RNA amount in each sample. The expression of β-actin and glyceraldehydes-3-phosphate dehydrogenase (GAPDH) among the intact and CCI rats' spinal cord and DRG using quantitative real-time PCR analysis were first examined. The β-actin and GAPDH genes expression of the CCI rats was normalized to those of intact rats. It was shown that 13-actin expressed more consistently than GAPDH in the spinal cord and DRG (data not shown). Thus, β-actin was chosen as a reference in the present study. Both on day 3 and 7 post-CCI, a statistically significant (p<0.05) increase of SIP30 mRNA in the ipsilateral, but not contralateral spinal cord was observed in CCI rats compared to sham or intact rats (FIG. 4).

[0105] However, in the DRG, SIP30 mRNA expression was not modified by CCI procedure. There was no difference between the ipsilateral and contralateral DRG in either sham or CCI rats (FIG. 4).

[0106] The upregulation of SIP30 protein was also demonstrated by western blotting analysis of the spinal cord from CCI rats. Increased signal for SIP30 was observed in ipsilateral lumbar spinal cord compared with the contralateral side of CCI rats and both side of sham-CCI animals (FIG. 4). Similar to the expression of SIP30 mRNA in the DRG from CCI and Sham rats, no significant changes in western blotting signal for SIP30 were found on both sides of the DRG following CCI (FIG. 4).

[0107] Spinal cord immunostaining indicated that SIP30 protein level was elevated in the ipsilateral side of spinal cord dorsal horn 3 and 7 days after CCI (FIG. 4).

[0108] SIP30 localization in CCI spinal cord was examined, showing colocalization with NeuN, a neuronal marker, in the spinal dorsal horn, 3 days after CCI (FIG. 4). SIP30 did not show overlap staining with either GFAP or OX-42 (FIG. 4).

[0109] These results indicate that during CCI, SIP30 levels were upregulated in the ipsilateral side of the spinal cord, suggesting a potential functional association between SIP30 levels and neuropathic pain.

[0110] SIP30 is involved in the development and maintenance of neuropathic pain. —Intrathecal administration of SIP30 AS (50 mg/10 ul, once a day for 4 days) starting on day 0 (6 hrs before CCI), produced a partial inhibition in the development of mechanical allodynia and thermal hyperalgesia by day 4 of SIP30 AS administration (FIG. 5). Two-way ANOVA showed a statistically significant difference between the antisense group and NS group (p<0.05). Two days after cessation of AS administration (post-CCI day 5), the AS group showed mechanical allodynia similar to the NS group (FIG. 5). On post-CCI day 7, thermal hyperalgesia appeared with similar paw withdrawal latencies to that of NS group (FIG. 5). Administration of MM had no effect on the development of mechanical allodynia and thermal hyperalgesia. Contralateral paw withdrawal thresholds and latencies were not affected by AS, MM, and NS treatment (FIG. 5).

[0111] To further verify SIP30-specific effect, the functional consequences of “knock-down” of SIP30 protein by a second SIP30 AS ODN SEQ. ID. No. 133 (AS II: 5′- GGC AAT CCT ACA GGT TCC AG -3′) directed towards nucleotides 143-162 of the coding region of the SIP30 gene, was examined. This AS II also produced an attenuation of CCI-induced mechanical allodynia and thermal hyperalgesia (FIG. 5). Two-way ANOVA showed a statistically significant difference between the antisense group and universal control (random ODN, 5-ACG TAA GCA ACG CTC AGC TA-3′).

[0112] By the 3rd day after CCI, animals developed both mechanical allodynia and thermal hyperalgesia. After this point of established neuropathic pain, 4th day of treatment with SIP30 AS resulted in an increase in paw withdrawal thresholds and latencies on the ipsilateral side to the CCI by the end of AS ODN treatment.

[0113] Two-way ANOVA showed a statistically significant difference between the antisense group and NS, or MM group on day 7 and 9 post-CCI (p<0.05, FIG. 5). Four days after AS withdrawal, mechanical allodynia and thermal hyperalgesia reappeared. Neither MM ODN nor NS altered paw withdrawal responses to mechanical and thermal stimuli in CCI rats. There was no effect of NS, AS and MM ODN treatment on contra-lateral hindpaw during and post treatment period (FIG. 5).

[0114] Treatment with SIP30 AS ODN (50 mg/10 ul, once a day for 4 days) had no detectable effect on the responses of naïve rats to Von Frey and thermal stimuli in both hindpaws (p>0.05, FIG. 5). Additionally, to rule out the possibility that intrathecal SIP30 AS ODN may produce non-specific motor deficiencies, locomotor activities were measured in naïve rats receiving SIP30 AS, and no abnormal behavior or motor deficiencies were observed during treatment with SIP30 AS ODN (data not shown).

[0115] Taken together, these findings showed that inhibition of upregulated SIP30 levels in the spinal cord resulted in attenuation of neuropathic pain behaviors both during the development process and the maintenance phase of neuropathic pain, suggesting a cause-effect relation between SIP30 up-regulation and the phenomenon of neuropathic pain.

[0116] Anti-SIP30 oligonucleotide knock-down inhibits both SIP30 and SNAP25 expression in the spinal cord—Considering the CCI procedure failed to affect the expression of SIP30 in the DRG at either mRNA or protein level, the following observations were focused only on the spinal cord. In order to verify whether intrathecal administration of SIP30 AS ODN indeed results in knockdown of SIP30 by disrupting the translation of SIP30 mRNA, the effect of SIP30 AS ODN on SIP30 mRNA and protein expression was assessed. SIP30 AS (50 ug/10 ul) and MM ODN (50 ug/10 ul) were injected intrathecally. The lumbar enlargement segments of the spinal cord were harvested at 6 hrs after the last injection. Quantitative PCR showed that SIP30 AS ODN significantly decreased SIP30 mRNA in the ipsilateral spinal cord compared with that by SIP30 mM ODN administration, for either day 0-3 or day 4-7 (FIG. 6). Moreover, western blotting showed that the SIP30 AS, but not MM ODN, markedly reduced the expression of SIP30 in the ipsilateral spinal cord to CCI after 3 days repeated intrathecal administration (FIG. 6), further substantiating the AS mediated “knockdown” of the SIP30 protein.

[0117] To assess the selective effect of SIP30 AS, we also examined two related synaptic proteins that are expressed in the spinal cord, synaptosome-associated proteins of 25 kDa (SNAP25), and postsynaptic density protein-95 (PSD95).

[0118] As shown in FIG. 6 SNAP25 mRNA exhibited significant up-regulation in the ipsilateral spinal cord on both day 3 and 7 post-CCI. PSD95 mRNA in the spinal cord, on the other hand, had no detectable change until day 7 post-CCI.

[0119] Neither SIP30 AS nor MM ODN blocked the upregulation of PSD95 mRNA in the ipsilateral spinal cord on day 7 after CCI (FIG. 6).

### Example 2

### Role of SIP30 in Intensifying Pain Sensitivity

[0120] Under isoflurane anesthesia, CD-1 mice were subjected to intrathecal administration of SIP30 and control reagents, in the form of plasmid DNA. Either plasmid containing SIP30 sequence or empty plasmid were used, together with a lipid transfection reagent. The control group of mice (n=6) received 2.0 ug empty plasmid DNA per mouse. For SIP30-containing plasmid, group A mice (n=5) received 2.0 ug SIP30 plasmid DNA per mouse, and group B mice (n=5) received 5.25 ug SIP30 plasmid DNA per mouse. The mice were tested for paw withdraw threshold via Von Frey filament over the next 24 days.

[0121] FIG. 7 depicts the outcome of the experiment. Mice in both SIP30 groups A and B showed significant change in Paw Withdraw Threshold from control group of mice at testing days 4, 6, and 8 (*, p<0.05 significant difference compared to control). Measurements included both legs from each mouse. By day 24, paw withdraw threshold had returned to normal levels. Those of ordinary skill in the art in possession of the present invention would appreciate the direct role of SIP30 in aggravating the neuropathic pain. The present findings provide ample guidance as to the duration and degree of SIP30 antagonism that is required to provide a therapeutic regimen.

[0122] Although the invention herein has been described with reference to particular embodiments, it is to be understood that these embodiments are merely illustrative of the principles and applications of the present invention. It is therefore to be understood that numerous modifications may be made to the illustrative embodiments and that other arrangements may be devised without departing from the spirit and scope of the present invention as defined by the following claims.

The application's sequence listing, which the Patent Office published only in electronic form, follows.

SEQUENCE LISTING (263 sequences)

SEQ ID NO: 1 - DNA, 1660 bp, Homo sapiens
attgtgggaaggcagctgaactcggcgcctggaaagatggaggcagcggagacagaggcggaagctgcagccctagaggtcctggctgaggtggcaggcatcttggaacctgtaggcctgcaggaggaggcagaactgccagccaagatcctggttgagtttgtggtggactctcagaagaaagacaagctgctctgcagccagcttcaggtagcggatttcctgcagaacatcctggctcaggaggacactgctaagggtctcgaccccttggcttctgaagacacgagccgacagaaggcaattgcagctaaggaacaatggaaagagctgaaggccacctacagggagcacgtagaggccatcaaaattggcctcaccaaggccctgactcagatggaggaagcccagaggaaacggacacaactccgggaagcctttgagcagctccaggccaagaaacaaatggccatggagaaacgcagagcagtccagaaccagtggcagctacaacaggagaagcatctgcagcatctggcggaggtttctgcagaggtgagggagcgtaagacagggactcagcaggagcttgacggggtgtttcagaaacttggaaacctgaagcagcaggcagaacaggagcgggacaagctgcagaggtatcagaccttcctccagcttctgtataccctgcagggtaagctgttgttccctgaggctgaggctgaggcagagaatcttccagatgataaaccccagcagccgactcgaccccaggagcagagtacaggagacaccatggggagagaccctggtgtgtccttcaaggctgttggtctacaacctgctggagatgtaaatttgccatgacttcctggaggacagcagcatggagaaagatcctagaaaaggcctctgacttccctcacctcccaaccatcattacaggaaagactgtgaactcctgagttcagcttgatttctgactacatcccagcaagctctggcatctgtggattaaaatccctggatctctctcagttgtgtatttgttcatcttcatatgctggcaggaacaactattaatacagatactcagaagccaataacatgacaggagctgggactggtttgaacacagggtgtgcagatggggagggggtactggccttgggcctcctatgatgcagacatggtgaatttaattcaaggaggaggagaatgttttaggcaggtggttatatgtgggaagataattttattcatggatccaaatgtttgttgagtcctttctttgtgctaaggttcttgcggtgaaccagaattataacagtgagctcatctgactgttttaggatgtacagcctagtgttaacattcttggtatctttttgtgccttatctaaaacatttctcgatcactggtttcagatgttcatttattatattcttttcaaagattcagagattggcttttgtcatccactattgtatgttttgtttcattgacctctagtgataccttgatctttcccactttctgttttcggattggagaagatgtaccttttttgtcaactcttacttttatcagatgatcaactcacgtatttggatctttatttgttttctcaaataaatatttaaggttaaaaaaaaa

SEQ ID NO: 2 - DNA, 1660 bp, Homo sapiens
gattgtgggaaggcagctgaactcggcgcctggaaagatggaggcagcggagacagaggcggaagctgcagccctagaggtcctggctgaggtggcaggcatcttggaacctgtaggcctgcaggaggaggcagaactgccagccaagatcctggttgagtttgtggtggactctcagaagaaagacaagctgctctgcagccagcttcaggtagcggatttcctgcagaacatcctggctcaggaggacactgctaagggtctcgaccccttggcttctgaagacacgagccgacagaaggcaattgcagctaaggaacaatggaaagagctgaaggccacctacagggagcacgtagaggccatcaaaattggcctcaccaaggccctgactcagatggaggaagcccagaggaaacggacacaactccgggaagcctttgagcagctccaggccaagaaacaaatggccatggagaaacgcagagcagtccagaaccagtggcagctacaacaggagaagcatctgcagcatctggcggaggtttctgcagaggtgagggagcgtaagacagggactcagcaggagcttgacagggtgtttcagaaacttggaaacctgaagcagcaggcagaacaggagcgggacaagctgcagaggtatcagaccttcctccagcttctgtataccctgcagggtaagctgttgttccctgaggctgaggctgaggcagagaatcttccagatgataaaccccagcagccgactcgaccccaggagcagagtacaggagacaccatggggagagaccctggtgtgtccttcaaggctgttggtctacaacctgctggagatgtaaatttgccatgacttcctggaggacagcagcatggagaaagatcctagaaaaggcctctgacttccctcacctcccaaccatcattacaggaaagactgtgaactcctgagttcagcttgatttctgactacatcccagcaagctctggcatctgtggattaaaatccctggatctctctcagttgtgtatttgttcatcttcatatgctggcaggaacaactattaatacagatactcagaagccaataacatgacaggagctgggactggtttgaacacagggtgtgcagatggggagggggtactggccttgggcctcctatgatgcagacatggtgaatttaattcaaggaggaggagaatgttttaggcaggtggttatatgtgggaagataattttattcatggatccaaatgtttgttgagtcctttctttgtgctaaggttcttgcggtgaaccagaattataacagtgagctcatctgactgttttaggatgtacagcctagtgttaacattcttggtatctttttgtgccttatctaaaacatttctcgatcactggtttcagatgttcatttattatattcttttcaaagattcagagattggcttttgtcatccactattgtatgttttgtttcattgacctctagtgataccttgatctttcccactttctgttttcggattggagaagatgtaccttttttgtcaactcttacttttatcagatgatcaactcacgtatttggatctttatttgttttctcaaataaatatttaaggttatacattt

SEQ ID NO: 3 - DNA, 1852 bp, Homo sapiens
gattgtgggaaggcagctgaactcggcgcctggaaagatggaggcagcggagacagaggcggaagctgcagccctagaggtcctggctgaggtggcaggcatcttggaacctgtaggcctgcaggaggaggcagaactgccagccaagatcctggttgagtttgtggtggactctcagaagaaagacaagctgctctgcagccagcttcaggtagcggatttcctgcagaacatcctggctcaggaggacactgctaagggtctcgaccccttggcttctgaagacacgagccgacagaaggcaattgcagctaaggaacaatggaaagagctgaaggccacctacagggagcacgtagaggccatcaaaattggcctcaccaaggccctgactcagatggaggaagcccagaggaaacggacacaactccgggaagcctttgagcagctccaggccaagaaacaaatggccatggagaaacgcagagcagtccagaaccagtggcagctacaacaggagaagcatctgcagcatctggcggaggtttctgcagaggtgagggagcgtaagacagggactcagcaggagcttgacagggtgtttcagaaacttggaaacctgaagcagcaggcagaacaggagcgggacaagctgcagaggtatcagaccttcctccagcttctgtataccctgcagggtaagctgttgttccctgaggctgaggctgaggcagagaatcttccagatgataaaccccagcagccgactcgaccccaggagcagagtacaggagacaccatggggagagaccctggtgtgtccttcaaggctgttggtctacaacctgctggagatgtaaatttgccatgacttcctggaggacagcagcatggagaaagatcctagaaaaggtcagacccaactcaggccttggtgtccctggactgcaagtgtggaaggagggaaagcctggtttacctctctctgcatctgagctctgctacccatggagcagatggatggtgggaacaggaaagagcttatgttacacctcattcccatgcttagcccacccagagctaacccctgtcttcttccccaggcctctgacttccctcacctcccaaccatcattacaggaaagactgtgaactcctgagttcagcttgatttctgactacatcccagcaagctctggcatctgtggattaaaatccctggatctctctcagttgtgtatttgttcatcttcatatgctggcaggaacaactattaatacagatactcagaagccaataacatgacaggagctgggactggtttgaacacagggtgtgcagatggggagggggtactggccttgggcctcctatgatgcagacatggtgaatttaattcaaggaggaggagaatgttttaggcaggtggttatatgtgggaagataattttattcatggatccaaatgtttgttgagtcctttctttgtgctaaggttcttgcggtgaaccagaattataacagtgagctcatctgactgttttaggatgtacagcctagtgttaacattcttggtatctttttgtgccttatctaaaacatttctcgatcactggtttcagatgttcatttattatattcttttcaaagattcagagattggcttttgtcatccactattgtatgttttgtttcattgacctctagtgataccttgatctttcccactttctgttttcggattggagaagatgtaccttttttgtcaactcttacttttatcagatgatcaactcacgtatttggatctttatttgttttctcaaataaatatttaaggttatacattta

SEQ ID NO: 4 - DNA, 1520 bp, Homo sapiens
gattgtgggaaggcagctgaactcggcgcctggaaagatggaggcagcggagacagaggcggaagctgcagccctagaggtcctggctgaggtggcaggcatcttggaacctgtaggcctgcaggaggaggcagaactgccagccaagatcctggttgagtttgtggtggactctcagaagaaagacaagctgctctgcagccagcttcaggtagcggatttcctgcagaacatcctggctcaggaggacactgctaagggtctcgaccccttggcttctgaagacacgagccgacagaaggcaattgcagctaaggaacaatggaaagagctgaaggccacctacagggagcacgtagaggccatcaaaattggcctcaccaaggccctgactcagatggaggaagcccagaggaaacggacacaactccgggaagcctttgagcagctccaggccaagaaacaaatggccatggagaaacgcagagcagtccagaaccagtggcagctacaacaggagaagcatctgcagcatctggcggaggtttctgcagagggtaagctgttgttccctgaggctgaggctgaggcagagaatcttccagatgataaaccccagcagccgactcgaccccaggagcagagtacaggagacaccatggggagagaccctggtgtgtccttcaaggctgttggtctacaacctgctggagatgtaaatttgccatgacttcctggaggacagcagcatggagaaagatcctagaaaaggcctctgacttccctcacctcccaaccatcattacaggaaagactgtgaactcctgagttcagcttgatttctgactacatcccagcaagctctggcatctgtggattaaaatccctggatctctctcagttgtgtatttgttcatcttcatatgctggcaggaacaactattaatacagatactcagaagccaataacatgacaggagctgggactggtttgaacacagggtgtgcagatggggagggggtactggccttgggcctcctatgatgcagacatggtgaatttaattcaaggaggaggagaatgttttaggcaggtggttatatgtgggaagataattttattcatggatccaaatgtttgttgagtcctttctttgtgctaaggttcttgcggtgaaccagaattataacagtgagctcatctgactgttttaggatgtacagcctagtgttaacattcttggtatctttttgtgccttatctaaaacatttctcgatcactggtttcagatgttcatttattatattcttttcaaagattcagagattggcttttgtcatccactattgtatgttttgtttcattgacctctagtgataccttgatctttcccactttctgttttcggattggagaagatgtaccttttttgtcaactcttacttttatcagatgatcaactcacgtatttggatctttatttgttttctcaaataaatatttaaggttatacattta

SEQ ID NO: 5 - DNA, 1640 bp, Homo sapiens
cagctgaactcggcgcctggaaagatggaggcagcggagacagaggcggaagctgcagccctagaggtcctggctgaggtggcaggcatcttggaacctgtaggcctgcaggaggaggcagaactgccagccaagatcctggttgagtttgtggtggactctcagaagaaagacaagctgctctgcagccagcttcaggtagcggatttcctgcagaacatcctggctcaggaggacactgctaagggtctcgaccccttggcttctgaagacacgagccgacagaaggcaattgcagctaaggaacaatggaaagagctgaaggccacctacagggagcacgtagaggccatcaaaattggcctcaccaaggccctgactcagatggaggaagcccagaggaaacggacacaactccgggaagcctttgagcagctccaggccaagaaacaaatggccatggagaaacgcagagcagtccagaaccagtggcagctacaacaggagaagcatctgcagcatctggcggaggtttctgcagaggtgagggagcgtaagacagggactcagcaggagcttgacggggtgtttcagaaacttggaaacctgaagcagcaggcagaacaggagcgggacaagctgcagaggtatcagaccttcctccagcttctgtataccctgcagggtaagctgttgttccctgaggctgaggctgaggcagagaatcttccagatgataaaccccagcagccgactcgaccccaggagcagagtacaggagacaccatggggagagaccctggtgtgtccttcaaggctgttggtctacaacctgctggagatgtaaatttgccatgacttcctggaggacagcagcatggagaaagatcctagaaaaggcctctgacttccctcacctcccaaccatcattacaggaaagactgtgaactcctgagttcagcttgatttctgactacatcccagcaagctctggcatctgtggattaaaatccctggatctctctcagttgtgtatttgttcatcttcatatgctggcaggaacaactattaatacagatactcagaagccaataacatgacaggagctgggactggtttgaacacagggtgtgcagatggggagggggtactggccttgggcctcctatgatgcagacatggtgaatttaattcaaggaggaggagaatgttttaggcaggtggttatatgtgggaagataattttattcatggatccaaatgtttgttgagtcctttctttgtgctaaggttcttgcggtgaaccagaattataacagtgagctcatctgactgttttaggatgtacagcctagtgttaacattcttggtatctttttgtgccttatctaaaacatttctcgatcactggtttcagatgttcatttattatattcttttcaaagattcagagattggcttttgtcatccactattgtatgttttgtttcattgacctctagtgataccttgatctttcccactttctgttttcggattggagaagatgtaccttttttgtcaactcttacttttatcagatgatcaactcacgtatttggatctttatttgttttctcaaataaatatttaaggtta

SEQ ID NO: 6 - DNA, 1640 bp, Homo sapiens
ggcacgagctcggctcctggaaagatggaggcagcggagacagaggcggaagctgcagccctagaggtcctggctgaggtggcaggcatcttggaacctgtaggcctgcaggaggaggcagaactgccagccaagatcctggttgagtttgtggtggactctcagaagaaagacaagctgctctgcagccagcttcaggtagcggatttcctgcagaacatcctggctcaggaggacactgctaagggtctcgaccccttggcttctgaagacacgagccgacagaaggcaattgcagctaaggaacaatggaaagagctgaaggccacctacagggagcacgtagaggccatcaaaattggcctcaccaaggccctgactcagatggaggaagcccagaggaaacggacacaactccgggaagcctttgagcagctccaggccaagaaacaaatggccatggagaaacgcagagcagtccagaaccagtggcagctacaacaggagaagcatctgcagcatctggcggaggtttctgcagaggtgagggagcgtaagacagggactcagcaggagcttgacggggtgtttcagaaacttggaaacctgaagcagcaggcagaacaggagcgggacaagctgcagaggtatcagaccttcctccagcttctgtataccctgcagggtaagctgttgttccctgaggctgaggctgaggcagagaatcttccagatgataaaccccagcagccgactcgaccccaggagcagagtacaggagacaccatggggagagaccctggtgtgtccttcaaggctgttggtctacaacctgctggagatgtaaatttgccatgacttcctggaggacagcagcatggagaaagatcctagaaaaggcctctgacttccctcacctcccaaccatcattacaggaaagactgtgaactcctgagttcagcttgatttctgactacatcccagcaagctctggcatctgtggattaaaatccctggatctctctcagttgtgtatttgttcatcttcatatgctggcaggaacaactattaatacagatactcagaagccaataacatgacaggagctgggactggtttgaacacagggtgtgcagatggggagggggtactggccttgggcctcctatgatgcagacatggtgaatttaattcaaggaggaggagaatgttttaggcaggtggttatatgtgggaagataattttattcatggatccaaatgtttgttgagtcctttctttgtgctaaggttcttgcggtgaaccagaattataacagtgagctcatctgactgttttaggatgtacagcctagtgttaacattcttggtatctttttgtgccttatctaaaacatttctcgatcactggtttcagatgttcatttattatattcttttcaaagattcagagattggcttttgtcatccactattgtatgttttgtttcattgacctctagtgataccttgatctttcccactttctgttttcggattggagaagatgtaccttttttgtcaactcttacttttatcagatgatcaactcacgtatttggatctttatttgttttctcaaataaatatttaaggtta

SEQ ID NO: 7 - DNA, 2430 bp, Chimpanzee type C endogenous retrovirus
gggattgtgggaaggcagctgaactcggcgcctggaaagatggaggcagcggagacagaggcggaagctgcagccctagaggtcctggctgaggtggcaggcatcctggaacctgtaggcctgcaggaggaggcagaactgccagccaagatcctggttgagtttgtggtggactctcagaagaaagacaagctgctctgcagccagcttcaggtagcggatttcctgcagaacatcctggctcaggaggacactgctaagggtctcgaccccttggcttctgaagacacgagccggcagaaggcaattgcagctaaggaacaatggaaagagctgaaggccacctacagggagcacgtagaggccatcaaaattggcctcaccaaggccctgactcagatggaggaagcccagaggaaacggacacaactccaggaagcctttgagcagctccaggccaagaaacaaatggccatggagaaacgcagagcagtccagaaccagtggcagctacaacaggagaagcatctgcagcatctggcggaggtttctgcagagggtaagctgttgttccctgaggctgaggctgaggcagagaatcttccagatgataaaccccagcagccgactcgaccccaggagcagagtacaggagacaccatggggagagaccctggtgtgtccttcaaggctgtcggtctacaacctgctggagatgcaaatttgccatgacttcctggaggacagcagcatggagaaagatcctagaaaaggtcagacccaactcaggccttggtgtccctggactgcaagtgtggaaggagggaaagcctggtttacctctctctgcatctgagctctgctacccatggagcagacggatggtgggaacaggaaagagcttatgttacacctcattcccatgcttagcccacccagagctaacccctgtcttcttccccaggcctctgacttccctcacctcccaaccatcattacaggaaagactgtgaactcctgagttcagcttgatttctgactacatcccagcaagctctggcatctgtggattaaaatccctggatctctctcagttgtgtatttgttcatattcatatgctggcaggaacaactattaatacagatactcagaagccaataacatgacaggagctgggactggtttgaacacagggtgtgcagatggggagggggtactggccttgggcctcaggggttgcttccccctatgatgcagacatggtgaatttaattcaaggaggaggagaatgttttaggcaggtggttatatgtgggaagataatttattcactaatccaaattgtattcatggatccaaatgtttgttgagtcctttctttgtgctaaggttcttgcggtgaaccagaattataacagtgagctcatctgactgttttaggatgtacagcctagtgttaacattcttggtatctttttgtgccttatctaaaacatttctcgatcactggtttcagatgttcatgtattatattcttttcaaagattcagagattggcttttgtcatccactattgtatgttttgtttcattgacctctagtgataccttgatctttcccactttctgttttcggatggagaagatgtaccttttttgtcaactcttacttttatcagatgatcaactcatgtatttggatctttatttgttttctcaaatatttaaggttatacatttcttctgacttcctttattttcacaatcattcaattcatagcatttcctatattctgttataattatttcattgattcataaatttctttgaaaaataatttggtcttctattgattgtgagaagataatctaagtttaatttggtcagagaatatcatctatttaacaaactttgtaatttggtgagtgaattatcttttttactgataaagagtgatgtcatcttttttaatgtttcacataggtttggaaagaatgcattttagattgtgtgtagtattttctattagattatgtttgcaatttttgtttcaatttatatcttatatacttaattttttgttgtctatcacctgagaggtgtgttcaaatctccaactatgatagtggatttgttcatttgtctttatagttccattttcttacatactttgcagctactttattaaggtatatgtaaatttacatttatatttttcttctgaactgaactctttgtgtggtagcctgcttcatctataggctaatgtgtttaaccttgaaaactaatagttttaatagtaatataactttgtcacttcttttggttaccctttgcttgacatcctttctcttgaatttccattcttttttagtttcaacctttctttatatttaccacttgtatacagcatttaaagggttatttat

SEQ ID NO: 8 - DNA, 2350 bp, Chimpanzee type C endogenous retrovirus
gggattgtgggaaggcagctgaactcggcgcctggaaagatggaggcagcggagacagaggcggaagctgcagccctagaggtcctggctgaggtggcaggcatcctggaacctgtaggcctgcaggaggaggcagaactgccagccaagatcctggttgagtttgtggtggactctcagaagaaagacaagctgctctgcagccagcttcaggtagcggatttcctgcagaacatcctggctcaggaggacactgctaagggtctcgaccccttggcttctgaagacacgagccggcagaaggcaattgcagctaaggaacaatggaaagagctgaaggccacctacagggagcacgtagaggccatcaaaattggcctcaccaaggccctgactcagatggaggaagcccagaggaaacggacacaactccaggaagcctttgagcagctccaggccaagaaacaaatggccatggagaaacgcagagcagtccagaaccagtggcagctacaacaggagaagcatctgcagcatctggcggaggtttctgcagaggtgagggagcgtaagacagggactcagcaggcgcttgagggggtgtttcagaaacttggaaacctgaagcagcaggcagaacaggagcgggacaagctgcagagggtaagctgttgttccctgaggctgaggctgaggcagagaatcttccagatgataaaccccagcagccgactcgaccccaggagcagagtacaggagacaccatggggagagaccctggtgtgtccttcaaggctgtcggtctacaacctgctggagatgcaaatttgccatgacttcctggaggacagcagcatggagaaagatcctagaaaaggcctctgacttccctcacctcccaaccatcattacaggaaagactgtgaactcctgagttcagcttgatttctgactacatcccagcaagctctggcatctgtggattaaaatccctggatctctctcagttgtgtatttgttcatattcatatgctggcaggaacaactattaatacagatactcagaagccaataacatgacaggagctgggactggtttgaacacagggtgtgcagatggggagggggtactggccttgggcctcaggggttgcttccccctatgatgcagacatggtgaatttaattcaaggaggaggagaatgttttaggcaggtggttatatgtgggaagataatttattcactaatccaaattgtattcatggatccaaatgtttgttgagtcctttctttgtgctaaggttcttgcggtgaaccagaattataacagtgagctcatctgactgttttaggatgtacagcctagtgttaacattcttggtatctttttgtgccttatctaaaacatttctcgatcactggtttcagatgttcatgtattatattcttttcaaagattcagagattggcttttgtcatccactattgtatgttttgtttcattgacctctagtgataccttgatctttcccactttctgttttcggatggagaagatgtaccttttttgtcaactcttacttttatcagatgatcaactcatgtatttggatctttatttgttttctcaaatatttaaggttatacatttcttctgacttcctttattttcacaatcattcaattcatagcatttcctatattctgttataattatttcattgattcataaatttctttgaaaaataatttggtcttctattgattgtgagaagataatctaagtttaatttggtcagagaatatcatctatttaacaaactttgtaatttggtgagtgaattatcttttttactgataaagagtgatgtcatcttttttaatgtttcacataggtttggaaagaatgcattttagattgtgtgtagtattttctattagattatgtttgcaatttttgtttcaatttatatcttatatacttaattttttgttgtctatcacctgagaggtgtgttcaaatctccaactatgatagtggatttgttcatttgtctttatagttccattttcttacatactttgcagctactttattaaggtatatgtaaatttacatttatatttttcttctgaactgaactctttgtgtggtagcctgcttcatctataggctaatgtgtttaaccttgaaaactaatagttttaatagtaatataactttgtcacttcttttggttaccctttgcttgacatcctttctcttgaatttccattcttttttagtttcaacctttctttatatttaccacttgtatacagcatttaaagggttatttataaaaaaa

SEQ ID NO: 9 - DNA, 2580 bp, Chimpanzee type C endogenous retrovirus
gggattgtgggaaggcagctgaactcggcgcctggaaagatggaggcagcggagacagaggcggaagctgcagccctagaggtcctggctgaggtggcaggcatcctggaacctgtaggcctgcaggaggaggcagaactgccagccaagatcctggttgagtttgtggtggactctcagaagaaagacaagctgctctgcagccagcttcaggtagcggatttcctgcagaacatcctggctcaggaggacactgctaagggtctcgaccccttggcttctgaagacacgagccggcagaaggcaattgcagctaaggaacaatggaaagagctgaaggccacctacagggagcacgtagaggccatcaaaattggcctcaccaaggccctgactcagatggaggaagcccagaggaaacggacacaactccaggaagcctttgagcagctccaggccaagaaacaaatggccatggagaaacgcagagcagtccagaaccagtggcagctacaacaggagaagcatctgcagcatctggcggaggtttctgcagaggtgagggagcgtaagacagggactcagcaggcgcttgagggggtgtttcagaaacttggaaacctgaagcagcaggcagaacaggagcgggacaagctgcagaggtatcagaccttcctccagcttctgtataccctgcagggtaagctgttgttccctgaggctgaggctgaggcagagaatcttccagatgataaaccccagcagccgactcgaccccaggagcagagtacaggagacaccatggggagagaccctggtgtgtccttcaaggctgtcggtctacaacctgctggagatgcaaatttgccatgacttcctggaggacagcagcatggagaaagatcctagaaaaggtcagacccaactcaggccttggtgtccctggactgcaagtgtggaaggagggaaagcctggtttacctctctctgcatctgagctctgctacccatggagcagacggatggtgggaacaggaaagagcttatgttacacctcattcccatgcttagcccacccagagctaacccctgtcttcttccccaggcctctgacttccctcacctcccaaccatcattacaggaaagactgtgaactcctgagttcagcttgatttctgactacatcccagcaagctctggcatctgtggattaaaatccctggatctctctcagttgtgtatttgttcatattcatatgctggcaggaacaactattaatacagatactcagaagccaataacatgacaggagctgggactggtttgaacacagggtgtgcagatggggagggggtactggccttgggcctcaggggttgcttccccctatgatgcagacatggtgaatttaattcaaggaggaggagaatgttttaggcaggtggttatatgtgggaagataatttattcactaatccaaattgtattcatggatccaaatgtttgttgagtcctttctttgtgctaaggttcttgcggtgaaccagaattataacagtgagctcatctgactgttttaggatgtacagcctagtgttaacattcttggtatctttttgtgccttatctaaaacatttctcgatcactggtttcagatgttcatgtattatattcttttcaaagattcagagattggcttttgtcatccactattgtatgttttgtttcattgacctctagtgataccttgatctttcccactttctgttttcggatggagaagatgtaccttttttgtcaactcttacttttatcagatgatcaactcatgtatttggatctttatttgttttctcaaatatttaaggttatacatttcttctgacttcctttattttcacaatcattcaattcatagcatttcctatattctgttataattatttcattgattcataaatttctttgaaaaataatttggtcttctattgattgtgagaagataatctaagtttaatttggtcagagaatatcatctatttaacaaactttgtaatttggtgagtgaattatcttttttactgataaagagtgatgtcatcttttttaatgtttcacataggtttggaaagaatgcattttagattgtgtgtagtattttctattagattatgtttgcaatttttgtttcaatttatatcttatatacttaattttttgttgtctatcacctgagaggtgtgttcaaatctccaactatgatagtggatttgttcatttgtctttatagttccattttcttacatactttgcagctactttattaaggtatatgtaaatttacatttatatttttcttctgaactgaactctttgtgtggtagcctgcttcatctataggctaatgtgtttaaccttgaaaactaatagttttaatagtaatataactttgtcacttcttttggttaccctttgcttgacatcctttctcttgaatttccattcttttttagtttcaacctttctttatatttaccacttgtatacagcatttaaagggttatttataaaaaaaaa

SEQ ID NO: 10 - DNA, 1770 bp, Rattus norvegicus
ggcgtggtgggcgtcagaaccatggcggacgcggagaaaaacgctgttgcggagaaaaacgctgttgcggaggaaaacgccgttgcggaggaaaacgccgttgcggataaaaacgcaacgaaagaggttctggctgaggcagcaagcgttctggaacctgtaggattgccggaagaagcagagctgcctgccaagatcatggaggaatttatgaggaactctcggaagaaagacaagctgctctgtagccagcttcaagtagtgaacttcttacagacttttctggcccaggaggataatactgaccagaacccagatgctctggcttctgaagatacaagtcgacaaaaggcaactgaaactaaggagcagtggaaggagctgaaggcaacatacatggatcatgtggacgtcatcaaatgtgccctgtctgaggccttgccccaggttaaagaggcacacaggaagtacaccgagcttcagaaggcttttgagcaactcgaggctaagaagcgagtccttgaggagaaactgcagttagctcagaagcagtgggtgctgcagcagaagcgtttgcagaatctgacaaagatttctgctgaggtcaagagacgccggaagagagctctggagaagcttgatggttctcaccaggaacttgaaaccttgaagcagcaagcaggacaggagcaggagaagctgcagaggaaccagagctacctccagctgctgtgctccctgcagaataagctggtcatctctgagtccaaggccgacgacaaagatgtcaaagggcccgcccttccacccaagtctccgtaaagatgaaagcgagaacgagactgcgctccagctgtgctgcttgggctgagaccagagtggttccttcgctgttgtatccctaggcctaggcctgtagccttgtacaatcttccaagcggactcagtttggcatctcttggcttctcagtgaattgttctgtttcatttcttaccatatattctggcttgttctgtcttcacctgggtccaacctgctgtttctgtaaaattgtgccagtgaaattgtcacgtgcatgcacgcaggcacacaggcacgcatgccacaaccacccttttctctcgctgatcttcagtagtctctcctctggccctctctctctctgtcttctctcccgaccagatgtgaaagtaactttatgcacccgatgtaattgttgcctcggaggctcattgatgaataagctcaccctgtgtagttcttgctaaactctggctggctggttcaactcagctcttctggttcaaacccgtctccaaactgactgattgaaacaggcctctcttggcttggaaagtctgctctgaactccagaactgaacggtactgactgcactgactcgactgaacgaaactgcaccgagttgattgactccttctccctttactgctcttaagtaccctctcttccctgtgctgtcctcctgagtcatgctgccaaatctttctctgattcatcacttcgcccctcaattaaactggcaatttcaaacgtggcacttagcatttcagttgtagtcacttaatactgcattcagaacttgagtctattgaatccataatgtgaaaccatgtcttcgtgactgtgacctcactactcagtattgtgtaaaagttttaggaactctccaagtaagcacttggtatttgctcattgatagaacagaaaaatgctgtgtagataataaataaacacggctataagatta

SEQ ID NO: 11 - DNA, 1765 bp, Rattus norvegicus
gggggtcagaaccatggcggacgcggagaaaaacgctgttgcggagaaaaacgctgttgcggaggaaaacgccgttgcggaggaaaacgccgttgcggataaaaacgcaacgaaagaggttctggctgaggcagcaagcgttctggaacctgtaggattgccggaagaagcagagctgcctgccaagatcatggaggaatttatgaggaactctcggaagaaagacaagctgctctgtagccagcttcaagtagtgaacttcttacagacttttctggcccaggaggataatactgaccagaacccagatgctctggcttctgaagatacaagtcgacaaaaggcaactgaaactaaggagcagtggaaggagctgaaggcaacatacatggatcatgtggacgtcatcaaatgtgccctgtctgaggccttgccccaggttaaagaggcacacaggaagtacaccgagcttcagaaggcttttgagcaactcgaggctaagaagcgagtccttgaggagaaactgcagttagctcagaagcagtgggtgctgcagcagaagcgtttgcagaatctgacaaagatttctgctgaggtcaagagacgccggaagagagctctggagaagcttgatggttctcaccaggaacttgaaaccttgaagcagcaagcaggacaggagcaggagaagctgcagaggaaccagagctacctccagctgctgtgctccctgcagaataagctggtcatctctgagtccaaggccgacgacaaagatgtcaaagggcccgcccttccacccaagtctccgtaaagatgaaagcgagaagagagctgcgctccagctgtgctgcttgggctgagaccagagtggttccttcgctgttgtatccctaggcctaggcctgtagccttgtacaatcttccaagcggactcagtttggcatctcttggcttctcagtgaattgttctgtttcatttcttaccatatattctggcttgttctgtcttcacctgggtccaacttgctgtttctgtaaaattgtgccagtgaaattgtcacgtgcatgcacgcaggcacacaggcacgcatgccacaaccacccttttctctcgctgatcttcagtagtctctcctctggccctctctctctctgtcttctctcccgaccagatgtgaaagtaactttatgcacccgatgtaattgttgcctcggaggctcattgatgaataagctcaccctgtgtagttcttgctaaactctggctggctggttcaactcagctcttctggttcaaacccgtctccaaactgactgattgaaacaggcctctcttggcttggaaagtctgctctgaactccagaactgaacggtactgactgcactgactcgactgaacgcaactgcaccgagttgattgactccttctccctttactgctcttaagtaccctctcttccctgtgctgtcctcctgagtcatgctgccaaatctttctctgattcatcacttcgcccctcaattagactggcaatttcaaacgtggcacttagcatttcagttgtagtcacttaatactgcattcagaacttgagtctattgaatccataatgtgaaaccatgtcttcgtgactgtgacctcactactcagtattgtgtaaaagttttaggaactctccaagtaagcacttggtatttgctcattgatagaacagaaaaatgctgtgtagataataaataaacacggctataagatcaaaa

SEQ ID NO: 12 - DNA, 1496 bp, Rattus norvegicus
  misc_feature (893)..(893): n is a, c, g, or t
accatggcggacgcggagaaaaacgctgttgcggagaaaaacgctgttgcggaggaaaacgccgttgcggaggaaaacgccgttgcggataaaaacgcaacgaaagaggttctggctgaggcagcaagcgttctggaacctgtaggattgccggaagaagcagagctgcctgccaagatcatggaggaatttatgaggaactctcggaagaaagacaagctgctctgtagccagcttcaagtagtgaacttcttacagacttttctggcccaggaggataatactgaccagaacccagatgctctggcttctgaagatacaagtcgacaaaaggcaactgaaactaaggagcagtggaaggagctgaaggcaacatacatggatcatgtggacgtcatcaaatgtgccctgtctgaggccttgccccaggttaaagaggcacacaggaagtacaccgagcttcagaaggcttttgagcaactcgaggctaagaagcgagtccttgaggagaaactgcagttagctcagaagcagtgggtgctgcagcagaagcgtttgcagaatctgacaaagatttctgctgaggtcaagagacgccggaagagagctctggagaagcttgatggttctcaccaggaacttgaaaccttgaagcagcaagcaggacaggagcaggagaagctgcagaggaaccagagctacctccagctgctgtgctccctgcagaataagctggtcatctctgagtccaaggccgacgacaaagatgtcaaagggcccgcccttccacccaagtctccgtaaagatgaaagcgagaagagagctgcgctccagctgtgctgcttgggctgagaccagagtggttccttcgctgttgtatccctaggcctangcctgtagccttgtacaatcttccaagcggactcaggtttggcatctcttggcttctcagtgaattgttctgtttcatttcttaccatatattctggcttgttctgtcttcacctgggtccaacttgctgtttctgtaaaattgtgccagtgaaattgtcacgtgcatgcacgcaggcacacaggcacgcatgccacaaccacccttttctctcgctgatcttcagtagtctctcctctggccctctctctctctgtcttctctcccgaccagatgtgaaagtaactttatgcacccgatgtaattgttgcctcggaggctcattgatgaataagctcaccctgtgtagttcttgctaaactctggctggctggttcaactcagctcttctggttcaaacccgtctccaaactgactgattgaaacaggcctctcttggcttggaaagtctgctctgaactccagaactgaacggtactgactgcactgactcgactgaacgcaactgcaccgagttgattgactccttctccctttactgctcttaagtaccctctcttccctgtgctgtcctcctgagtcatgctgccaaatcctcgtgcc

SEQ ID NO: 13 - DNA, 2676 bp, Mus musculus
aaaggcgtggtgagcgacagaacgatggcggacgcggagaaaaacgctgttgcggagaaaaacaacgctgttgcgacgaaagaggttctggctgaggcagcagccattctagaacctgtaggcttgcaggaagaagcagagctgcctgccaagatcatggaggagtttatgaggaactcgcggaagaaagacaaactgctctgtagccagcttcaagtagtgaacttcttacagacttttctggctcaggaggacactgagcagagccctgatgctctggcttctgaagatgccagtcggcaaaaggcaactgaaactaaggagcagtggaaggacatgaaggccacatacatggatcacgtggatgtcataaaatgtgccctgtctgaggccttaccccaggttaaagaggctcacaggaagtacacagagcttcagaaggcttttgagcaactcgaggctaagaagcgagtccttgaggagaaacttcagctggctcagaagcagtgggtactgcaacagaagcgtttgcagaacctgacaaagatttctgcagaggtcaagaggcgccggaagagggctctggagaagcttgacggatcccatcaggaactggaaaccttgaagcagcaagcggggcaggaacaggagaagctgcagaggaaccagagctacctccagctgctgtgttcgctgcagaataagctggtcatctctgagggcaaggctgaggacaaagatgtgaaagggcgagcccttacagccaaatccaaatctccttaaagggtgaaaacattgatgggtgaaatttgcctttttgcaccgcatttatggatcatcttgaaaaagaaatgagtgcttccaaaccactcagtgaaggaggagacgaagcagctttgtaaaccgcaaagttaaatccacctactgtacagctgtcctgcaacgagagcattgagtgagaagacagcagggaaggaagaacattccaggggaagtggcagttgccatggggtggtggtggttatgaaaatgcatgagtaaaggaaaataattctgcactaagataaagcaaaaagccatagcgtgaggactgagcccagctaacaggatactggacatgagcctctctgagggagacatgtcagtgagaagctttgagtctataaactgataaggaccacattgacttctctgtacagattagaccagggatgataggtttgaaatacagatatttagaatttatggttgtattaacaagattgaaagatgactaagatctgggttaggaattgttggcagaaacgtggtaaatcttgtggttattggatagatttaggctgttttacttataccattgattggacgttaagtgtttgaactatatattgggggaattccaaagtttctttattctgaactggtaggatccagttctgtgctgacataaagaattgacagggctggaccttaaccaagaaacagcttatggtaggtgtacaattgagatttgtccaagtggtacacttgaccactgcattcatgtgtctaaggaccattgagcagacgggaattatgcagcttcactccatctagggctgagatggctaagaacacaaaagtatggtaacaactagagataggctgacacggtcagcttcaacacctgttatattatgcatgtttgtattttgaaagggacaaagaagaacactggtttggcctggaacaccttttctactgagaatgagaagtggcctgatatacttatagcttgacaagtgagatggtttgatgatgtcttcaagagctaaggagaagggactgaaagaaatttagttaagattgaaagctggttgtgaagcctgttagcagatcttcaggatggacgtagtgagatgcagcaaacctgttctttgcctgaagaacctgcaacaagactttgtggcctggattgttgacccattgcatggatatggactttctgggaaaccttagattgttggaaacatttatgggaataggaatctttcattaaatacctcaattttctttgttgttgatgttgttgttatagcacaatctaccgtattctgcctgatttaagataaagagcataaaaatagtgctagcttgtgagagttagcctgccaaggactgtgagggctagatagtgagaggttggaattgagccaagacacactgatgataaaataggtggaggagtagtgaagatagttgctgaagtatgccaggctttagttttatttagaaaaaaccataagcctttattacatttctgtttgataattatctgagcccccaaacttctcctcaaatagtctgttttaaaagtacaatttatttacttccatttatctgaagatatgtgccttccatttctaatttgaaagtgctcagagtaaatcttaggataggttagttaacatcagctgatgtctttgtctacttttgagtctgaggacaccagtgatacttaattgggtcttactctgtgctttcatttttacttgactattgttttaaagcctcatttccaaacaaagtcacaaagagccactgaaggctagatttttgtaactattaaacagtaaaaagtatgctacatgtataagatgtataaatacttatttaagaattatataagagtattct

SEQ ID NO: 14 - DNA, 1770 bp, Mus musculus
cgatggcggacgcggagaaaaacgctgttgcggagaaaaacaacgctgttgcgacgaaagaggttctggctgaggcagcagccattctagaacctgtaggcttgcaggaagaagcagagctgcctgccaagatcatggaggagtttatgaggaactcgcggaagaaagacaaactgctctgtagccagcttcaagtagtgaacttcttacagacttttctggctcaggaggacactgagcagagccctgatgctctggcttctgaagatgccagtcggcaaaaggcaactgaaactaaggagcagtggaaggacatgaaggccacatacatggatcacgtggatgtcataaaatgtgccctgtctgaggccttaccccaggttaaagaggctcacaggaagtacacagagcttcagaaggcttttgagcaactcgaggctaagaagcgagtccttgaggagaaacttcagctggctcagaagcagtgggtactgcaacagaagcgtttgcagaacctgacaaagatttctgcagaggtcaagaggcgccggaagagggctctggagaagcttgacggatcccatcaggaactggaaaccttgaagcagcaagcggggcaggaacaggagaagctgcagaggaaccagagctacctccagctgctgtgttcgctgcagaataagctggtcatctctgagggcaaggctgaggacaaagatgtgaaagggcgagcccttacagccaaatccaaatctccttaaagatgaaaggatgagaagagagccgtattcataccctgcttgggctgagaccagattggttccttcactgttgtatctctaggcctaagcctggaagtttgttgcctctgtacaatctaattctccaagctgattcaatctggcatctcttggcttttcagtgaactgttgtgttttgtctcatgctaactttgacagtatattctggcttgttctgtcttcacctgtgtctaacttgctgtccttgcaacctgtctctgtaaaagtgtaccagtgaaactcacacgcatgcatgcacgcacacaggcacgcatgccacaaccacccttttctctcgctgatcttcagtagtctctcctcttgtcctctctttttctttgtcttctctccctaccagatgtgaaagcaactttatgcgcctgctgtaattgttgtctgaggattactgcgagtaagctcaccctttgtagttactaaactggccggctggctgggtcagctccgctgtactggttcataacccggcttcaagttgactgattcaaaggggcctctcttggcttctgactgaactgctctgcttggaaagtctgatggacttcaggaacagaactgtactgactgccctgactcagctgaactcaactacaccaaattcattggttctctctgctgtactgctcttaggtagcctctctcctgtgctgtcctcctgagtcgtgctgtcaaatctctctctgattcatcactttgcccctcaattagactggcagtttcaaacacggcacttaacatttcagttgtagtcacttgatactgcattccgaacttgagtctattgaatccagaatgtgaatccatgcctttgtgactgtgacctcactctcttcagtattgtgtaaaagttttaggaactctccaagtaaatacttggtaattgctcattgatagaacagaaaaatgctgtgtagataataaataaacatataactataagattaaaaaaaaa

SEQ ID NO: 15 - DNA, 2677 bp, Mus musculus
gaaaggcgtggtgagcgacagaacgatggcggacgcggagaaaaacgctgttgcggagaaaaacaacgctgttgcgacgaaagaggttctggctgaggcagcagccattctagaacctgtaggcttgcaggaagaagcagagctgcctgccaagatcatggaggagtttatgaggaactcgcggaagaaagacaaactgctctgtagccagcttcaagtagtgaacttcttacagacttttctggctcaggaggacactgagcagagccctgatgctctggcttctgaagatgccagtcggcaaaaggcaactgaaactaaggagcagtggaaggacatgaaggccacatacatggatcacgtggatgtcataaaatgtgccctgtctgaggccttaccccaggttaaagaggctcacaggaagtacacagagcttcagaaggcttttgagcaactcgaggctaagaagcgagtccttgaggagaaacttcagctggctcagaagcagtgggtactgcaacagaagcgtttgcagaacctgacaaagatttctgcagaggtcaagaggcgccggaagagggctctggagaagcttgacggatcccatcaggaactggaaaccttgaagcagcaagcggggcaggaacaggagaagctgcagaggaaccagagctacctccagctgctgtgttcgctgcagaataagctggtcatctctgagggcaaggctgaggacaaagatgtgaaagggcgagcccttacagccaaatccaaatctccttaaagggtgaaaacattgatgggtgaaatttgcctttttgcaccgcatttatggatcatcttgaaaaagaaatgagtgcttccaaaccactcagtgaaggaggagacgaagcagctttgtaaaccgcaaagttaaatccacctactgtacagctgtcctgcaacgagagcattgagtgagaagacagcagggaaggaagaacattccaggggaagtggcagttgccatggggtggtggtggttatgaaaatgcatgagtaaaggaaaataattctgcactaagataaagcaaaaagccatagcgtgaggactgagcccagctaacaggatactggacatgagcctctctgagggagacatgtcagtgagaagctttgagtctataaactgataaggaccacattgacttctctgtacagattagaccagggatgataggtttgaaatacagatatttagaatttatggttgtattaacaagattgaaagatgactaagatctgggttaggaattgttggcagaaacgtggtaaatcttgtggttattggatagatttaggctgttttacttataccattgattggacgttaagtgtttgaactatatattgggggaattccaaagtttctttattctgaactggtaggatccagttctgtgctgacataaagaattgacagggctggaccttaaccaagaaacagcttatggtaggtgtacaattgagatttgtccaagtggtacacttgaccactgcattcatgtgtctaaggaccattgagcagacgggaattatgcagcttcactccatctagggctgagatggctaagaacacaaaagtatggtaacaactagagataggctgacacggtcagcttcaacacctgttatattatgcatgtttgtattttgaaagggacaaagaagaacactggtttggcctggaacaccttttctactgagaatgagaagtggcctgatatacttatagcttgacaagtgagatggtttgatgatgtcttcaagagctaaggagaagggactgaaagaaatttagttaagattgaaagctggttgtgaagcctgttagcagatcttcaggatggacgtagtgagatgcagcaaacctgttctttgcctgaagaacctgcaacaagactttgtggcctggattgttgacccattgcatggatatggactttctgggaaaccttagattgttggaaacatttatgggaataggaatctttcattaaatacctcaattttctttgttgttgatgttgttgttatagcacaatctaccgtattctgcctgatttaagataaagagcataaaaatagtgctagcttgtgagagttagcctgccaaggactgtgagggctagatagtgagaggttggaattgagccaagacacactgatgataaaataggtggaggagtagtgaagatagttgctgaagtatgccaggctttagttttatttagaaaaaaccataagcctttattacatttctgtttgataattatctgagcccccaaacttctcctcaaatagtctgttttaaaagtacaatttatttacttccatttatctgaagatatgtgccttccatttctaatttgaaagtgctcagagtaaatcttaggataggttagttaacatcagctgatgtctttgtctacttttgagtctgaggacaccagtgatacttaattgggtcttactctgtgctttcatttttacttgactattgttttaaagcctcatttccaaacaaagtcacaaagagccactgaaggctagatttttgtaactattaaacagtaaaaagtatgctacatgtataagatgtataaatacttatttaagaattatataagagtattct

SEQ ID NO: 16 - DNA, 1805 bp, Mus musculus
gaatccaaaggcgtggtgagcgacagaacgatggcggacgcggagaaaaacgctgttgcggagaaaaacaacgctgttgcgacgaaagaggttctggctgaggcagcagccattctagaacctgtaggcttgcaggaagaagcagagctgcctgccaagatcatggaggagtttatgaggaactcgcggaagaaagacaaactgctctgtagccagcttcaagtagtgaacttcttacagacttttctggctcaggaggacactgagcagagccctgatgctctggcttctgaagatgccagtcggcaaaaggcaactgaaactaaggagcagtggaaggacatgaaggccacatacatggatcacgtggatgtcataaaatgtgccctgtctgaggccttaccccaggttaaagaggctcacaggaagtacacagagcttcagaaggcttttgagcaactcgaggctaagaagcgagtccttgaggagaaacttcagctggctcagaagcagtgggtactgcaacagaagcgtttgcagaacctgacaaagatttctgcagaggtcaagaggcgccggaagagggctctggagaagcttgacggatcccatcaggaactggaaaccttgaagcagcaagcggggcaggaacaggagaagctgcagaggaaccagagctacctccagctgctgtgttcgctgcagaataagctggtcatctctgagggcaaggctgaggacaaagatgtgaaagggcgagcccttacagccaaatccaaatctccttaaagatgaaaggatgagaagagagccgtattcataccctgcttgggctgagaccagattggttccttcactgttgtatctctaggcctaagcctggaagtttgttgcctctgtacaatctaattctccaagctgattcaatctggcatctcttggcttttcagtgaactgttgtgttttgtctcatgctaactttgacagtatattctggcttgttctgtcttcacctgtgtctaacttgctgtccttgcaacctgtctctgtaaaagtgtaccagtgaaactcacacgcatgcatgcacgcacacaggcacgcatgccacaaccacccttttctctcgctgatcttcagtagtctctcctcttgtcctctctttttctttgtcttctctccctaccagatgtgaaagcaactttatgcgcctgctgtaattgttgtctgaggattactgcgagtaagctcaccctttgtagttactaaactggccggctggctgggtcagctccgctgtactggttcataacccggcttcaagttgactgattcaaaggggcctctcttggcttctgactgaactgctctgcttggaaagtctgatggacttcaggaacagaactgtactgactgccctgactcagctgaactcaactacaccaaattcattggttctctctgctgtactgctcttaggtagcctctctcctgtgctgtcctcctgagtcgtgctgtcaaatctctctctgattcatcactttgcccctcaattagactggcagtttcaaacacggcacttaacatttcagttgtagtcacttgatactgcattccgaacttgagtctattgaatccagaatgtgaatccatgcctttgtgactgtgacctcactctcttcagtattgtgtaaaagttttaggaactctccaagtaaatacttggtaattgctcattgatagaacagaaaaatgctgtgtagataataaataaacatataactataagattaaaaaaaaaaaaaaag

SEQ ID NO: 17 - DNA, 1607 bp, Bos taurus
gagttccagagtagagctggagcgcagcctggagcaaaatgggggctgcagagtctgaagtggagactgcagcccgagaggtcctggccaaggtagcagacatccaggagcctgttggttttcaggaggaagctgaactgcctgcccagatcctggctgagtttgtgatggactctcggaagaaagacaagctcctttgcagccagcttcaagtagtagacttcctgcagaatttcttggttcaggaaggcactgcccaggaccagaaccccttggcttctgaagacacaagccggcagaaggcacttgaagccaaagagcaatggaaagagctgaaggccacatatcaagaacatgtggaggttatcacaaattccctgaccgaggcactgcccaaggtggaggaggcccaaataaagcaggcacagctccaggaggcccttaaacagctccaggccaagaagcaaatggccatggaaaaactcagaatagcccagaagcagtggcagctggaacaggagaagcatttgcagaatctggcggaggcttcatcagaagtgagggagcgtcagacaggagctcaacaggaacttcaacgactatatcaggaacttggaaccctgaagcagcaggcagggcaggagaaggacaagctgcagaggcaccagaccttcctccagctgctatacaccctgcagggtaagcagctattcaatgaggcagaggcagagataccacaggagttggatcttcctaaggataagctccaacaggtgacccagccccaggaacagaacactcaggacaccatgggaagagaggctgacaacccacagcctgttggagatgcaggcttaccatggcttcctggcagacagcaacataaggaagaatcctagagcaggccctgatttgctatgaactgaagttgcagaagtggacttaactgaccagtcactggccacttggagcataatgataatgaacaagtcaataggatggtttcagtatgtgtgacaacagggttgcaaactgaaacagtaataaagagcaatagtgaaaaagtatagagacccgcccccccaacctctatattggtctatgatatgtgagttggtatttctatttgtgctggtatgtttgtgtttctatatttttgtttgttgctttcattctccattcctctatgtgtctcactgaatgtatgaacagtgggatcactactgtgtttgaggaagtgattacatccctgatctgtagcctattctaggatgtcctaatgttatattcctgatacattttttgtgttctactgttttttttccttgactcatcctttcggattgtcattcatcttcaaatattcgcatgctgaaagactggcttttgtgattctctgttgtatgttttgttctggttcattgatttgtagtagtatcttgatcattttctggcttctgtttttaggtcaagaatatgtttttttttggtaaactttttatcaggtaataaacttctgtatttggacctttatttgttttctcaaataaacatttaaagttaaaaaaaaaaaaaaaaaaaaaaaaaaaagaaaaaaaaaaaaataa

SEQ ID NO: 18 - DNA, 1607 bp, Bos taurus; identical to SEQ ID NO: 17

SEQ ID NO: 19 - DNA, 1708 bp, Bos taurus
agtcccagagtagagctggagcgcagcctggagcaaaatgggggctgcagagtctgaagtggagactgcagcccgagaggtcctggccaaggtagcagacatcctggagcctgttggttttcaggaggaagctgaactgcctgcccagatcctggctgagtttgtgatggactctcggaagaaagacaagctcctttgcagccagcttcaagtagtagacttcctgcagaatttcttggttcaggaaggcactgcccaggaccagaaccccttggcttctgaagacacaagccggcagaaggcacttgaagccaaagagcaatggaaagagctgaaggccacatatcaagagcatgtggaggttatcacaaattccctgaccgaggcactgcccaaggtggaggaggcccaaataaagcaggcacagctccaggaggcccttaaacagctccaggccaagaagcaaatggccatggaaaaactcagaatagcccagaagcagtggcagctggaacaggagaagcatttgcagaatctggcagaggcttcgtcagaaggtaagcagctattcaatgaagcagaggcagagataccacaggagttggatcttcctaaggataagctccagcaggtgacccagccccaggaacagaacactcaggacaccatgggaagagaggctgacaacccacagcctgttggagatgcaggcttaccatggcttcctggcagacagcaacataaggaagaatcctagagcaggccctgatttgctatgaactgaagttgcagaagtggacttaactgactagtcactggccacttggagcataatgataatgaacaagtcaataggatgatttcagcgtgtgtgacaacagggttgcaaactgaaacagtaataaagagcaatagtgaaaaagtatagagacccgcccccccaacctctatattggcctatgatatgtgcattggtatttctatttgtgctggtatgtttgtgtttctatatttttgtttgttgctttcattctccattcctctatgtgtctcactgaatgtatgaacagtgggatcactactgtgtttgaggaagtgattacatccctgatctgtagcctattctaggatgtcctaatgttatattcctgatacattttttgtgttctactgtttttttttccttgactcatcctttcggattgtcattcatcttcaaatattcgaatgctgaaagactggcttttgtgattctctattgtatgttttgttctggttcattgatttgtagtagtatcttgatcattttctggcttctgtttttaggtcaagaatatgtttttttttggtaaactttttatcaggtaataaacttgtgtatttggacctttatttgttttctcaaataaacatttaaagttattttcttctggcttcctattagtattttcacaatcattcaattcgtagatttttctattaaaattatttctttgattcatgagtttcttagaaaaataattttcaaattttttactctatgtgagaggataatctttctaggtttattctaatttagtcagaaaatgtcaaatctataataaaaactttgaaatttagtgacggaagcagttgtagccttgaatgtgatttctttaatgtttcatgttgatttttttttctttttttttcatgttgattttttaaa

SEQ ID NO: 20 - DNA, 2069 bp, Macaca fascicularis
attgtgggaaggcggctgaacgcggcccctagaaggatggaggcggcggagacagaggcggaagctgcagccctagaggtcctggctgaggtggcaggcatcctggaacctgtaggcttgcaggaggaggcagaactgccagccaagatcctggttgagtttgtggtggtatgtacaagatgagagcgagcctttcagaagccagggtctggtcctggctcctcttattgagatacagggcagcattggcagagagcagactttaaggaaacctgtaaggaggtaaggacgttccctgtctctgccctccctctgagcaggactcccagaagaaagacaagctgctctgcagccagcttcaggtagtggacttcctgcagaacatcctggctcaggaggacactgctaagggtctggaccccttggcttctgaagacaccagccgtgagtaggcaggggattggagtagcatctggcctgagtggggaacgaaggaggatttcagataggtctcccatttggctgatgggaaggaggcccagtgttgcaaggaggcaggctagcaggccaccctcactcatgttctcattcctggtggctcatctcaggacagaaggcaattgcagctaaggaacaatggaaagagctgaaggccacctacagggagcacgtagaggccatcaaaattggcctcaccaaggccctgactcagatggaggaagcccagaggaagcggacacaactccaggaagcctttgagcagctccaggccaagaaacaagtggccatggagaaacgcagagcagcccagaaccagtggcaactacaacaggagaagcatctgcagcatctggcaaaagtttctgcagagggtaagctgttgttccctgaggctgaagctgaggcagagaatcttccagatgataaaccccagcagctgactcgaccccaggagcagagtacaggagacactatggggagagatgctggtgtgtccttcaaggctgtcagcctacaacctgctggagatgcaaatttgccatgacttcctggaggacaacagcatggagaaagatcctagaataggtcagacccaacttaggccttggtgtccctggatgcaagtgtggaaagagggaaagcctctctgtgcatctgagctctgctacccatggagcagatggatggtgggaacaggaaagagcttatgttacagtttaacacctcattcccttgctcagcccacccagagctaacccctgtcttcttccccaggcctctgacttccctcaccacccccaaccatcattccaggaaagactgtgaactcctgttgctgttcagcctgattgctgactacatcccagcaagctctggcatctgtggattaaaagccctggatctctctcagttgcgtatttgttcatcttcatatgctggcaggaaaaactattagtacagatactcagaagccaataacatgacaggagctgggactggtttgaacacagggtgtgcagatggggagggggtactggccttgggcctcaggggttgcttccccctatgatgcagacatgctgaatttaattcaaggaggaggagattgctttaggcaggtggttatatgtgggaagataatttattcactaatccaaattttattcatggatccaaatgtttgttgagtcctttctttgtgctaaggttcttgctgtgaaccagagctgtaacagtgaattcatctgactgttttaggttgtatagcctagtgttaacattcttagtgtctttttgtgccttaaaacatttcttgatcactggtttcagatgttcatttataatattcttttcaaagattcagagattggcttttgtcatccactattgtatgttttgtttcattgacctctagtgataccttgatcgtttcctactttctgttttcagatggagaagatgtaccttttttgtaaactcttattttgtaaactcttatttttatcagatgatcaactcatgtacttgaatatttgttttctcaaataaatatttaaggctaaaaaaaa

SEQ ID NO: 21 - DNA, 2070 bp, Macaca fascicularis
attgtgggaaggcggctgaacgcggcccctagaaggatggaggcggcggagacagaggcggaagctgcagccctagaggtcctggctgaggtggcaggcatcctggaacctgtaggcttgcaggaggaggcagaactgccagccaagatcctggttgagtttgtggtggtatgtacaagatgagagcgagcctttcagaagccagggtctggtcctggctcctcttattgagatacagggcagcattggcagagagcagactttaaggaaacctgtaaggaggtaaggacgttccctgtctctgccctccctctgagcaggactcccagaagaaagacaagctgctctgcagccagcttcaggtagtggacttcctgcagaacatcctggctcaggaggacactgctaagggtctggaccccttggcttctgaagacaccagccgtgagtaggcaggggattggagtagcatctggcctgagtggggaacgaaggaggatttcagataggtctcccatttggctgatgggaaggaggcccagtgttgcaaggaggcaggctagcaggccaccctcactcatgttctcattcctggtggctcatctcaggacagaaggcaattgcagctaaggaacaatggaaagagctgaaggccacctacagggagcacgtagaggccatcaaaattggcctcaccaaggccctgactcagatggaggaagcccagaggaagcggacacaactccaggaagcctttgagcagctccaggccaagaaacaagtggccatggagaaacgcagagcagcccagaaccagtggcaactacaacaggagaagcatctgcagcatctggcaaaagtttctgcagagggtaagctgttgttccctgaggctgaagctgaggcagagaatcttccagatgataaaccccagcagctgactcgaccccaggagcagagtacaggagacactatggggagagatgctggtgtgtccttcaaggctgtcagcctacaacctgctggagatgcaaatttgccatgacttcctggaggacaacagcatggagaaagatcctagaataggtcagacccaacttaggccttggtgtccctggatgcaagtgtggaaagagggaaagcctctctgtgcatctgagctctgctacccatggagcagatggatggtgggaacaggaaagagcttatgttacagtttaacacctcattcccttgctcagcccacccagagctaacccctgtcttcttccccaggcctctgacttccctcaccacccccaaccatcattccaggaaagactgtgaactcctgttgctgttcagcctgattgctgactacatcccagcaagctctggcatctgtggattaaaagccctggatctctctcagttgcgtatttgttcatcttcatatgctggcaggaaaaactattagtacagatactcagaagccaataacatgacaggagctgggactggtttgaacacagggtgtgcagatggggagggggtactggccttgggcctcaggggttgcttccccctatgatgcagacatgctgaatttaattcaaggaggaggagattgctttaggcaggtggttatatgtgggaagataatttattcactaatccaaattttattcatggatccaaatgtttgttgagtcctttctttgtgctaaggttcttgctgtgaaccagagctgtaacagtgaattcatctgactgttttaggttgtatagcctagtgttaacattcttagtgtctttttgtgccttaaaacatttcttgatcactggtttcagatgttcatttataatattcttttcaaagattcagagattggcttttgtcatccactattgtatgttttgtttcattgacctctagtgataccttgatcgtttcctactttctgttttcagatggagaagatgtaccttttttgtaaactcttattttgtaaactcttatttttatcagatgatcaactcatgtacttgaatatttgttttctcaaataaatatttaaggctaaaaaaaaa

SEQ ID NO: 22 - DNA, 1890 bp, Macaca mulatta
gattgtgggaaggcggctgaatgcggcgcctagaaggatggaggcggcggagacagaggcggaagctgcagccctagaggtcctggctgaggtggcgggcatcctggaacctgtaggcttgcaggaggaggcagaactgccagccaagatcctggttgagtttgtggtggactcccagaagaaagacaagctgctctgcagccagcttcaggtagtggacttcctgcagaacatcctggctcaggaggacactgctaagggtctggaccccttggcttctgaagacaccagccgacagaaggcaattgcagctaaggaacaatggaaagagctgaaggccacctacagggagcacgtagaggccatcaaaattggcctcaccaaggccctgactcagatggaggaagcccagaggaagcggacacaactccaggaagcctttgagcagctccaggccaagaaacaagtggccatggagaaacgcagagcagcccagaaccagtggcaactacaacaggagaagcatctgcagcatctggcaaaagtttctgcagaggtgagggagcgtaagacagggactcagcaggagcttgagggggtgtttcagaaacttggaaacctgaagcagcaggcagaacaggagcaggacaagctgcagaggtaccagactttcctccagcttctgtataccctgcagggtaagctgttgttccctgaggctgaagctgaggcagagaatcttccagatgataaaccccagcagctgactcgaccccaggagcaaagtacaggagacactatggggagagatgctggtgtgtccttcaaggctgtcagcctacaacctgctggagatgcaaatttgccatgacttcctggaggacaacagcatggagaaagatcctagaataggtcagacccaacttaggccttggtgtccctggatgcagtatggaaagagggaaagcctctctgtgcatctgagctctgctacccatggagcagatggatggtgggaacaggaaagagcttatgttacagtttaacacctcattcccttgctcagcccacccagagctaacccctgtcttcttccccaggcctctgacttccctcaccacccccaaccatcattccaggaaagactgtgaactcctgagttcagcctgattgctgactacatcccagcaagctctggcatctgtggattaaaagccctggatctctctcagttgcgtacttgttcatcttcatatgctggcaggaagaactattagtacagatactcagaagccaataacatgacaggagctgggactggtttgaacacagggtgtgcagatagggagggggtactggccttgggcctcaggggttgcttcctccaatgatgcagacatgctgaatttaattcaaggaggaggagattgctttaggcaggtggttatatgtgggaagataatttattcactaatccaaattttattcatggatccaaatgtttgttgagtcctttctttgtgctaaggttcttgctgtgaaccagagctgtaacagtgagctcatctgactgttttaggttgtatagcctagtgttaacattcttagtgtctttttgtgccttaaaacattgcttgatcactggtttcagatgttcatttataatattcttttcaaagattcagagattggcttttgtcatccactattgtatgttttgtttcattgacctctagtgataccttgatcgtttcctactttctgttttcagatggagaagatgtaccttttttgtaaactcttattttgtaaactcttatttttatcagatgatcacatcatgtacttgaatatttgttttctcaaataaatatttaaggctatacattt

SEQ ID NO: 23 - DNA, 1017 bp, Equus caballus
atggaggtggcggagaccaaggcggaggctgctgcgttagagaccctggcagaggtggcagatatcctggagccaagaggcctgcaggaggaggcagaagtgcctgcccagatcctggccgagtttgtgacggactcccgaaagaaagacaagctgctctgtagccagcttcaggtggtagacttcctgcagaacttcttggctcaggaggacactgcccagggcctggaccccttggcttctgaagacacgagccggcagaaggcaattgcagccaaagagcaatggaaggagctgaaggccacctaccaagagcatgtggaagccatcacaagtgccctgactcaggtcctgcccaaggtggaggaggcccaaaggaagcgggcacagctccaggaggcccttgaacaactccaggccaagaagcaagtggccgcggagaaactcagagtagcgcaaaagcagtggcagctgcaacaggagaagcatctgcagcatctggcagaggtttctgcagaggtgagagagcgtcagacaggaatgaaacaggagcttgagcggctgtatcaggaacttggaaccctgaagcaggaggcagggcaggagcgagaaaagctgcagaggcaccagaccttcctccagctgctctacaccctgcagggtaagctgctactccctgaggcagaggcagagctaccacaagagcgggatcttcctgaacctaagtcccagcaggtgacccagtcctgggagctcaacactggggacaccatggagagagtcggggatgtgtcgtccaaggagctggattttgaggactccctcaagagtggcacaagagttggcagcagagtagagggaggtgtgggcttagcatctcgggtatggggatgctcatgggtccagtggggagatcctcgagcagggtacacccagaggtctgtgggcaagtctcctattgaagtcctgaagcaggcaggaagaaacatgttccttcagttcactttaatattttga

SEQ ID NO: 24 - DNA, 825 bp, Ornithorhynchus anatinus
atggccatcctcgcctcccaggatggacgggaggaagccgaggctgaagtgccagccaagctccttgccgagtttgtgatggactcgagaaagaaggacaagttactctgcagccagctccatgtggtgcagttcttgcaggatttcctggagcatatggatgcagctcccggattccatatctcggaggaggagatccgaaaagaggccaatgaagccaaacaaaagtggaaggatctcaaaggggactaccaggagctggtggagaaaatcgaggaggccatgccacgggttttgcagcaggtggaagctctgcagaagaaacgggaactcctggaggaagccctcagtgaataccaaatgcagaaacactctactgaggagaaactgcgagctgttcaggaacagaagcagcgggaccagaactgcagggcgatgggggtgatgaatgagttccccttagactggaaacagcaggagtggcagctgcgttacctgaagccatcttgtgtgtgcaccctcgctgtgcaacccggtttgctgggttcatccagccttgaggcggtgcggttgatctccgtggagggcctcccgaacccccccgacctgttgctgtacaagggcccgggaggggtcaggccttgtgacccgaacagcgcagacccaaaatccctaaacatggggccctcgctccgtggggcatatgggaaagagcaacaagagctagtgatatatggcgccaagcccagtgtagttttcctcgggcaggaggactggcaaaatggagtcacaattgaggcccctcgcgtctccagctcaggatag

SEQ ID NO: 25 - DNA, 585 bp, Monodelphis domestica
atggcggccgacgtgactgctcgagcggcggcggtagcggaggctctggcttcagccgccgccacgttagaggcccccagcgttcaggaggatgtctcatctgctctgctggcagagttcttgaaggactcgaggaagaaggagaagctgctgtggggccagctgcaggtggtggatgccctccagagcttcctggagcacatggacgaggctgtgaaccccgaagaggagatccgggcagaagtcagcgcagcccataggctgtggaaagacctgaaggccgagtacctaaagcagacagaagccgtggaggccgccctgctgcaggccctggtacaactggaggctggccagaggaagcagcttttattgagaagcactctgcagcagatccagaccaaagggcgggccttggaggagtggaggagcagggctcaaacctggcgaaggcaggagcaggaaaagcgcaggcaagagttaaccgctagagcccaggcccagagagaacgcctggagaatggtggccaacagcaggagcaggtgctgatgctccagggtcaagagacacagagtgcccagaggtga

SEQ ID NO: 26 - DNA, 1205 bp, Canis familiaris
atggcggaggcggaggtcggggcgcgcgcccaggcgctcgaggccctggccgcgctgggggacatcctggagcccgtgggccggcaagaggaggtagagctgccagcccagatcctggcggagttcgtgatggactcccggaagaaggacaagctgctctgcagtcagcttcaggtagtagacttcctgcagaacttcctggctcaggagggcatcgtccagggactagaccccttggcttctgaagacacgagccggcagaaggcacttgcagtcaaggagcaatggaaagagctgaaggccacttaccaggagcacgtggaagccatcacaggtgccctgacccaggccctggccaagacggaggaggcgcagagcaagcgggtgcagctccaggaagccctggaacagctccaggccaagaagcaagtggccatggagagagcgagaacagcccagaagcagtggcagctgcaacaggagaagcgtctgcagcatctggcagaggcttcagcagaggtgagacagcggcagagaggagctcagcaggagcttgagcggctgcgtcaggaacttggagccttacaacagcaggccgggcagaagcgggacaggcttcagaggcaccagaccttcctccggctgctgcacatactgcagggtgagccactgctccccggggcagagacggagcggcctcaagagctgggtattcctgaggctaagccccgggagcagaacactggggatgctgtggggaaagacaggagtgtgccatcccaggccgatggcctgcagcctgcccgagggacaagctcacgttggtttcctgagggacagcaacatgggaaaggaacgtagagcaggacttgaggcctgtttgtgttacactgccatgaagaaaatttgtgtacacaaaaggagattcttctttattttcagaaatcatagcatggaaaatacaacaaaatatacttgaggaggcttctaaaagcaaacggaattctataaacacggagtttactttagatgttaaaatgtaatgttcatgaataatagccacaaacgtcttttgggcaatacacttttcgttttgcttataaaattatacgtaactgaagatggttacactttataaatgtctaatgtgcgttgctatttatagatgcttcttttattaataaaatgtgcaatgccactgtctt

SEQ ID NO: 27 - DNA, 885 bp, Sus scrofa
atggaggcggcggagaccaaagcggaggctgcagcccgagaggccttggccaaggtggcagacatcctggaacctacaggtcttcaggaggaggcagaactgcccgcccagatcctggctgagtttgtgatggactctcggaagaaagacaagctcctctgcagccagctacaagtagtagacttcctacagaacttcttaatccaggaagacactgcgcagggcttggaccccttggcttctgaagacacaagccgaaagagggcaattgaagccaaagagcaatggaaagagctgaaggccacctaccaggagcatgtggaggccatcacaagtgccttgacccaggcactgcccaagatggaggaggcccaaaagaagcaagcacagctacaagagacccttgaacaactccaggccaagaagcaagtagctgtggaaaaactcagaatagcccagaagcagtggcagctgcaacaggagaagcatctgcagcacctgacaaaggtttctgcagaggtgaaggaacgtcagatgggaactcagcaggagtttgaacgtctgtatcaggaacttggggccctgaagcaacaggcaaggcaggagcaggacaaactgcagaggcatcagaccttcctccagctgctttacaccctacagggtaagctgctgttctctgaggctgaggcggaggcacagataccacaagaactgaaccttcctaaggataagcccctgcagctgacccaaccccaggaacagaaccctcaggacatcatgggaagagatggaagtgtgtcctctaaggtcgacagcccccagcccattggagatgcaagcttaccatggcttcctggggcacagcaacatggggaaggatcctag

SEQ ID NO: 28 - DNA, 4270 bp, Homo sapiens
gagggccgctgtcactcagccccgcgggccaatagaaaaggggtgaaccccgccttcttcctgagttgtgctgcgggcatgcgcactgggcgtccccacgccaccgcccatcagctgagaattgcagctgagggctccggggtaggtgggtgacggcggtcggaggtgtaggagggagccgtggaggtccaggtgactgcttagaaaactgcacagcatctgatgaaattagcgaataagaacatcaaccatgtcttacactccaggagttggtggtgaccccgcccagttggcccagaggatctcttctaacatccagaagatcacacagtgttctgtggaaatacaaagaactctgaatcaacttggaacacctcaagattcacctgaattgaggcaacagttgcaacagaagcagcagtatactaaccagcttgccaaagaaacagataagtacattaaagagtttggatctctgcccaccacccccagtgaacagcgtcaaaggaaaatacagaaggatcgcttagtggcagagttcacaacatcactgacaaacttccagaaggtccagaggcaggctgctgagcgagagaaagagtttgttgctcgagtaagagccagttccagagtgtctggcagttttcctgaggacagctcaaaagaaaggaatcttgtatcctgggaaagccaaactcaacctcaagtgcaggtgcaggatgaagaaattacagaggatgacctccgtcttattcatgagagagaatcttctatcaggcaacttgaagctgatattatggatattaatgaaatatttaaagatttgggaatgatgattcatgaacaaggagatgtaatagatagcatagaagccaatgtggaaaatgcagaggtgcacgttcagcaagcaaatcagcagctgtcaagggcagcagattatcagcgcaaatccagaaaaaccctgtgcatcatcattcttatccttgtcattggagttgcgattatcagtctcatcatatggggattgaaccactgaagttataaaggagcacactgtcgcactacattgtctaaattatgtaggaagattcctgtaatcatgtttttttaattattattttaaagctattgtataaaggatggttcccatactttgttatttttattgggggggttggggtggttcctttggattaaatctgatattttctaatactgaaagattttctaaatgtcactgctgacataactcccttggtcttcaatttaatagttgttaagtttttgcccacattgcatatgcctttcatttataatttatttaccctgcttgacttagttttgggaattcgtaaatttaaaggtgtgtgtattctgtttgcatctccctgtcactgtgacacacctagatgtgtgttacttcaattaaaattctcaaatttaattttgatttgcttcagcagggaaaatattctcaataatgtaaaataattaaggtctatacatgggttgtatttttctggttcacaacagcacaaagtgtctttcatttttttgttggttttcttttaagatcttttttaccctgaagtcggtgaatacttttctagtttatttgatactctttctgtgtatatattaagcttttgctgtagattgcctagtaaaattactaaggataggttgtttttacatatggtctatttaagtctgatgtttacgggggaaagtgtagttactaaaaatgtttaacataatttggaagaagagtatgaacaaccaataccaatacctattgcgtttggattcttaagaccccagtttgttattccactaaactagttatcttaaccatatcatctggttttgtgggccattatttaccttcccttatgtcttatagaataatggttaatatttttaggtcaaaattacttttggaaagtaactttcccacaattaactgtttttgagcacctgacaaaatttagtgtttaccttgcgtgccattttgtgtcatccttcattaaaaaagcaattggaggtttgccagttatctcacttccctttttaaatcaatgttgttttaatgcactaatctgaattctgtaaagaggattatcttagtttatactttgtattttataatgttcttgtatagcagctcggtactgaaggcggtgtttaacttggcaagctctgagacttcaaatgggaacaaatagtaagtagctaagtaaaccacatctttgcaaccaaaataaagatgagttaaaaggtatctggttaggcctatttcatgaggactatgctctggtgggaccacaggtcacctgatacttagtgctgtgctgcctgaaacctcagcatggagacatcaccacatgcactgtggccattcagcatctttctggagcaccagttcactccaggtttttattttagggtgtcatcgattttacctactttgtcagactggtagaagttgctttgcatatcagaaaaactccatttttttccacaaaagggattacagaaaactcttttgtgagtgagtgattggaacttagagactcctgttgccagaatcagactgccctagaacagaatggacaatgcagggaggagaattcacacaaacagcacctgttctgaggcctgtgccagcccaccaggcctgctcaaatgtggtctttacttcaagtgcacagaggcacatgaggtttctggtgataaaccagcgtcttaccgctgttttaaagtcccatccccatggctttcacaatcagttccgttttttttgctgtacttgataaaatgtttattctcatacaggtcaagtacatttacttctattcacagtgagtacccaataacaacaaaagcgcttacaaatttggggggcgtgattttagtacctttatttgaagtgtaatcattttaaattattattattttaactggggcagttatcagtggtttaaacaggaactttagtggcttcaatttgtttaagaaacatattaagtttgagggaaaaatttcccatgaaatatttggaacgtaagagtagtattgattagagaaaattaaataagaaacatagtatggtagccaaattttttaaaaaatcttgaacttttctgtaggtcagttttagaactgctgtgaaaagtgaaggttgccctgtggagattaaaattagagttgttttcataactgacagcatggtgaatccatttgagtcaaagtgaagaatttcctcatcaagtgactatacatttgtttttgtgtgctcaaaagaaatactcaaacacagactgatattaaccagccaggtaaattgaacgacaatgtggcattaggtatttggctgtttattggtcgttaaatactatggttttgcaatatgattgatggtaaaagagtgatgtcatattgatactagagtagcttgtttttttagtaggtgtgggaccatctcttttacaagtgcaactcagtctaggacagccatggatgcagtgtctggagttggaccctctgagcccgctggctgccccagtagcatctgcattggtgaccaaggacactgcactttgaagaggtcgccactgggttatttagtgtcttcactgcttttgttaaaaattgtaaaattttgtacacaaaaagttgtgtttttgaatatcaattgtttagacacacctacaatgataaataagtgcctttaaaggcccctctttccatgaaatacatctgtggtttagcaaggaaagtacaaaatagtttatgtagttggtataatttttatttgtgtcttcatgtagaaaaaatgaatgtcataataaaatataaaacttacgtaaagaaaataaagtcattgtccaccttaatagctaaggtccacaagggtaacttatgcagcatttattttttttgaaagtcaaaattgaatttatttctttcacatggctggtttgctgcaatatgaagtttcagaatgggctgaagtaagttgattgagggatttgagttgaatgacattttcaagttcatttaaatatgataaaaattcattggtggtaaataacatctgtctttcctggaaaaaaaaaagttgtgtattttcatgattcagttaaaacaaaaaatgagcctgtgaatcccaggcctttttagtcctccataacatttgaacagtttgacttgtcagcaaagaaatacacttatcaaattttaaaccaatgggagcctgaaagtgttacag

SEQ ID NO: 29 - DNA, 860 bp, Homo sapiens
gtcaacttagcgagcgcaacaggctgccgctgaggagctggagctggtggggactgggccgcaatggacaagctgaagaaggtgctgagcgggcaggacacggaggaccggagcggcctgtccgaggttgttgaggcatcttcattaagctggagtaccaggataaaaggcttcattgcgtgttttgctataggaattctctgctcactgctgggtactgttctgctgtgggtgcccaggaagggactacacctcttcgcagtgttttatacctttggtaatatcgcatcaattgggagtaccatcttcctcatgggaccagtgaaacagctgaagcgaatgtttgagcctactcgtttgattgcaactatcatggtgctgttgtgttttgcacttaccctgtgttctgccttttggtggcataacaagggacttgcacttatcttctgcattttgcagtctttggcattgacgtggtacagcctttccttcataccatttgcaagggatgctgtgaagaagtgttttgccgtgtgtcttgcataattcatggccagttttatgaagctttggaaggcactatggacagaagctggtggacagttttgtaactatcttcgaaacctctgtcttacagacatgtgccttttatcttgcagcaatgtgttgcttgtgattcgaacatttgagggttacttttggaagcaacaatacattctcgaacctgaatgtcagtagcacaggatgagaagtgggttctgtatcttgtggagtggaatcttcctcatgtacctgtttcctctctggatgttgtcccactgaattcccatgaatacaaacctattcagcaacagcaaaaa

SEQ ID NO: 30 - DNA, 2090 bp, Homo sapiens
gccggcgccgctgccactcccgggagcatgaaggaccgaacccaggagctccgcacggccaaggacagcgatgatgatgatgatgtcgctgtcaccgtggaccgagaccgcttcatggatgagttctttgagcaggtggaggagattcgaggcttcattgacaagatcgcagagaacgtggaggaggtgaagcggaagcacagtgccatcctggcatcccccaaccccgatgagaagacgaaggaggagctggaagaactcatgtccgacataaagaagacagcaaacaaagttcgttccaagttaaagagcatcgagcagtccatcgagcaagaggaaggcctgaaccgctcctccgctgacctgaggatccggaagacacagcactccacgctgtccagaaagtttgtggaggtcatgtcggagtacaacgccacgcagtccgactaccgcgagcgctgcaaaggccgcatccagaggcagctggagatcaccggcaggaccacgaccagtgaggagctggaggacatgctggagagtgggaaccccgccatctttgcctctgggatcatcatggactccagcatctcgaagcaggctctgagcgagattgagacgcggcacagtgagatcatcaagctggagaacagcatccgtgagctacacgacatgttcatggacatggccatgctcgtggagagccagggagagatgattgacaggatcgagtacaatgtggaacacgcggtagactatgtggagagggccgtgtctgacaccaagaaggccgtcaagtaccagagcaaggcgcgccggaagaaaatcatgatcatcatctgctgtgtgatcctgggcatcgtcatcgcctccactgttgggggcatcttcgcctagaagccacccaaactgccactccactccaggtgggccactccaaggaggccctggctgctgccacctggctgggctgccctcccaacccccgcctctggctcagagcaccctccctcccggcccccatgctcccttctctgccatgggccctccgtccccgccccgtgtcgtgtgcatgatctctgtgagtgtgcgtctgtacgggaagaggcagagggaggcagccagcggggcgtgatgcagtgtgcacagcgaggagcagacccaggcagggccgccagggtgacacaggccacccttccttgccttcagtaactcggtgggcccaggttctgctcttccctggggaccctaacctcgcctccagctgacctgccctgtcctctccagctgtccccacaagcagagccctgaggggtggggaccagctggccacatggtgctgcttttcaggttaggggagaggtggccctgagggacagcccagctctgagtctcagtcgctgatcactgccagggaggctcaggctgccatggctccaggctccctcccctgcctaggggcaaagtccatcgggtcctgggcctcagcttcccttcccacattcctccggccccaggagcaaccccttgggctaggtctgaccccaggtgtccctctggaaggggctggctggtgccctatttccagccaccccagcagctagggaggcaaagcaggctgcagtcagtccctcaagccagcgttgcatgtttgggatggtggctcctgttgtcttgcgctctgggaagtcagatgtcatttcaggcctgcagtctcatcctgcccttgccatcctcccatcgatgtgccacgtgggtgtcacgtgtcccagatgcagtattcggcagccagccggggagggctacctcctcctcctcaccaccttggggcttctcatgggaaatgtgcccccgccccaggaccctctcccttgtggacaggcagggagatgcatgcgagtgcatgcagcaggggatggggccgtgtccgtgtgccccaccctccctcggctttactcctgcccagtgactgtgaccactgtccgtgttgccttcttgaacagcgattccccccaaccccttcaccaaaggtcttggtacaaccagctgcccattttgtgaaatttttatgtagaataaacatttgtatctgt

SEQ ID NO: 31 - DNA, 1960 bp, Homo sapiens
ccaggctgcacggtaggaccggggcgaggggagccaggcggtcagggcggaggccaagcccgggagatgcggttgcagccgccacggctgttggggcgcctggcgctccgtccgaggcgggtggctgtgaggccaggggagtaggcaggctcccagagagattcttccaagttggcgggtggcgggagagggggccgcgcgccccggcgcagctgctttgtgcgcgcagagagggactcgtgtccctggttctctccaaccctgggacccgttgtgcgggcagtattgggcaagccgcagaacggagcgatttcctccgagaaagttgaggatggagcctttttttccgcaccgtccccgcgatggcatgggccccgagaatgctgccccgaggctcccagtgtgggggagctcggggtcgctgcgcctctagcttgagcgcagaaatccgcgaatcactccgatcttcgcgaactctggcatcttctaggaaaatcattactgccaaaactgaggcgagcttttctggcgggcacggcaccctgcccccagggcgctggccctgggcgatgccccctttccgatctcaggcttggtcaagggcgccaggttccgaattcgcgcttgccgtgcacgccggcatcgagcctcaccaacaccgccgggcaacgtggctggagtagattcactgcgtgctgtcctcacttgttctacaatgagtgccaaatctgctatcagcaaggaaatttttgcacctcttgatgaaaggatgctgggagctgtccaagtcaagaggaggacaaagaaaaagattcctttcttggcaactggaggtcaaggcgaatatttaacttatatctgcctgtcagtgacaaacaagaaacccacacaggcgtccatcacaaaggtcaaacagtttgaaggctccacatcatttgttcggagatcacagtggatgctcgagcagcttcgccaggttaatggtatcgatcctaatggggattcggcagagtttgatttgttgtttgaaaatgcttttgaccagtgggtagccagcacagcgtcagaaaaatgcaccttcttccagatcctccaccatacctgccagaggtacctcacggacaggaagccagagtttattaactgccaatccaaaattatgggaggaaacagcatcctccattcagctgctgacagcgtgaccagcgcagtgcagaaggcaagccaggccttgaatgagcgtggagagcgattaggccgagcagaggagaagacagaagacctgaagaacagcgcccagcagtttgcagaaactgcgcacaagcttgccatgaagcacaaatgttgagaaactgcctatcctggtgactcttcttaagagaaactgaagagtttgttcagcagtttttacaagaattcgggacctccgcttgcttctttttttccaatatttggacacttagagtggtttttgttttttcttttcagatgttaatgtgaaagaaagggtgttgcatttttacatttccctaatgatcttgctaataaatgctacaatagcatcggcttcattttgggtttttgcctcctcccactgtgtgtatgtgtgtatatgtatgttttgaatatgttttctttattaaaaaatattttttgtagtttgaatatgaaatttggaccaaatgataaactgcgctgagtctaaactggcaacatgtatttttttctctgatattaagcaggaaggcattttaatgtggtgacatcagatgttatttttcctagatgaaaataaaagtcaagcagtgattagtttcactcactgtcctagctacacttaatttgaagattaaaattctacattgtggaaaacaattgaatttattgggaaaaacagcagtcttagattttgctccttgcatagtaatcttttgcatgaaccatcaccagcgttcaaaaa

SEQ ID NO: 32 - DNA, 970 bp, Homo sapiens
gggcttcaggacaattcgtgatggcgggggctggttccgccgctgtatcgggggcagggaccccggtggcggggcccacaggccgcgaccttttcgccgaagggctgctggagttcctgcgacccgctgtgcagcagctcgactctcacgtacacgccgtcagagagagccaggtagagctccgggaacaaattgacaacctagccacagaactgtgccgcataaatgaggatcagaaggtggccctggatcttgacccctatgttaagaagctacttaatgcccggcgacgcgttgtcttggttaacaacattctacagaatgctcaggaacgactgagacggctaaaccacagtgttgccaaggaaacagcccgcaggagagcaatgctggattcgggaatttacccccctggctccccaggcaaataacagatgagcctatggactcagtagcacaagtactgttccccagctgccttgtttcaacagacatgcaaagatcctaggagacagtccccatagaccttcagacattaaaaagggagccgtacagtttgtttgaagcacttcgtcttacccatttatgtaggggccccaggaaacctacacacagccagaatgaggttcccaaaggacttacattaattatggctcttgcttcctttcacaaatgagctgaggcctctacttttttttttttaagctgcatacttgaggcttaccttcttcaggactagttaaccagaggggcttcctttgtatgttacatgcctggttacatgggcctggacagcatgtcctctacctgtgacttctcattttcctgtttacactggggatttggagggggcaggcaaagtcaaagtgaatgacctctgtccacccacttttttattgcactggcttgaatacagtagcagtgttgatagaatcattttattcaataaatacttaaaatgaaaaaaaaa

SEQ ID NO: 33 - DNA, 3250 bp, Homo sapiens
gagttcggagtagagatggccgcgcttgcaccgctgcccccgctccccgcacagttcaagagcatacagcatcatctgaggacggctcaggagcatgacaagcgagaccctgtggtggcttattactgtcgtttatacgcaatgcagactggaatgaagatcgatagtaaaactcctgaatgtcgcaaatttttatcaaagttaatggatcagttagaagctctaaagaagcagttgggtgataatgaagctattactcaagaaatagtgggctgtgcacatttggagaattatgctttgaaaatgtttttgtatgcagacaatgaagatcgtgctggacgatttcacaaaaacatgatcaagtccttctatactgcaagtcttttgatagatgtcataacagtatttggagaactcactgatgaaaatgtgaaacacaggaagtatgccagatggaaggcaacatacatccataattgtttaaagaatggggagactcctcaagcaggccctgttggaattgaagaagataatgatattgaagaaaatgaagatgctggagcagcctctctgcccactcagccaactcagccatcatcatcttcaacttatgacccaagcaacatgccatcaggcaactatactggaatacagattcctccgggtgcgcacgctccagctaatacaccagcagaagtgcctcacagcacaggtgtagcaagtaatactatccaacctactccacagactatacctgccattgatcccgcacttttcaatacaatttcccagggggatgttcgtctaaccccagaagactttgctagagctcagaagtactgcaaatatgctggcagtgctttgcagtatgaagatgtaagcactgctgtccagaatctacaaaaggctctcaagttactgacgacaggcagagaatgaagcctttgtatgacagacccatgtatttttggcatgaggaactaacagtccattactctatcttcagcctatcaggatcacagttttaaggaagacttggttttgttgaatatgacaatgaaatctgtgtgtatcagatttttattgaagcattcatcagcagcctcaaccagttttcattgtccatttactagattcaatcgtctctgagtatatagggctgatgttagcaagaccctaaaaatgtccattgaaccctgcttcaaaaaatgaaaacacacctctataaaatgtgtactgggaataagctttgtatttacatacattaggggaattttttaaaatctgtaatgtttggacaaacagatgatattactttgctataaaattataaatgtaacttttaataaagatagccagaatattctaaattagaaattacgtttttgtttccctcaagacataaaacaaatataaacattctaaactgctggatgaatctgaaaagacattaagttcaaattttaatttattctcatattaaatataactccattaaaagtttaaaatttcatgggagaaaatataataaggtaaagaggtagaatcactttcagacttaagaataatgttgatttcccaagtgctttaccttatctgttaaagcgtaagatgaattggtatttgcttcataggcagtttgactgcatgtattagagaatgaaaagaagatatttgtagtaatgcctggaaacttggtgctttaaattaaggtactcctctgctgctgtagaatggattccacacagtggatagctatgggtgattcagaatattatgtttagattcccatttgttaagtttataagttttgtggggaattatgaacttactgtgtactacctgcatttgtgctgtgtgaaaaataaatacaaggattcgtttagctaattcaacttactacaaagacaaatgtctgtttttatttgcctgctaggattgtcttttttaaaagtcatttttatttataggaatatgggtgtttctataggaagaaacaggttttttgttttttgttttttaagataaatttgacaaagttaactgaaatttatctggtccattttattcatgctactaagatgggaatctttaaacacaagggtcagcaagctttggcccatggattggccacctgttacgtaaataaagtttctttgaaacaagcctacactcattcatttatgttttgtctgtggttgctttccacaactgcagagttgtatggcttgcaagtctaaaaacatttactatttggccctctaagaaaaagttaagacacctagtctaatggccttttgggaaaaaacaaatcactaactcataatcatttatatccattattttctgcataaatgtaatgctattgtacagggtttggtagaataaatattcagactgactaaactgttctaaatcctcacaaaaaagtccccaaacaacatgcctcctaaaaaacattttcctatcttttacaagaggtatgaacatttgtagggttccacatttgcatctagaaatccaatgctctttagaatgttattacgaatagaaagatggccaggatgacctttagtgttacatgatgttcagcaaattttaattcaaaccttgatatgcctggacactgaaaagtaaacgcatcacctcctattttataccctaccttctggttcccaattgggagagcacatagagggaaggagacaatatagaaactacggagtccgctggtagtgggctgcatggtgtgacagagcccttctctgtaaaatggaaatgacaccactagccatctcaatagttacaagaattaaaagagatacagtacctgaagtgcttagcgcatggtagcatttcataaatgtttagtgtcaatactaatgctctaataatgtaaattgttaataatttatttccctaatatcaggaaatcccagttgtctatgtggcccagtgcttaaaaacgccttcttgcatgaggggattgaactatacaatgtttgttaactttgtatttgtattttttcctataaaatcttaaaataaaattaggagatgtgttctgatgtaacagtaggattagcaattttcatttattccttccatatatatttactgaatggctactatatgcctggtattgttctttgaaagcagaaacagcaggaaaaaaagtccctccctcatagagtttacattctaaaagggaggaaatagataataaaatatacattacatttaaaaaaaa

SEQ ID NO: 34 - DNA, 750 bp, Homo sapiens
agatgcgaggtgggcgggggcaggctgaaagttggagcaagcaggaagtgaactgagggccaccctgggaggaagccgactaggcgaattcacttactgaccggcctgggctgctctgagacatggaggaagccagtgaaggtggaggaaatgatcgtgtgcggaacctgcaaagtgaggtggagggagttaagaatattatgacccagaatgtggagcggatcctggcccggggggaaaacttggaacatctccgcaacaagacagaggatctggaagccacatctgagcacttcaagacgacatcgcagaaggtggctcgaaaattctggtggaagaacgtgaagatgattgtccttatctgcgtgattgtttttatcatcatcctcttcattgtgctctttgccactggtgccttctcttaagtaacagggaacctctcccacctgcccttctcttcagggacaaccctccataaatgtgtgccaagagggtctcctttcctgtcttcctctacagagaatgctgctcggtcctcctacccctcttcccgaggccctgctgccatgttgtatgccccagaaggtaccttggtcccccggaaggagagaaaaaagagagatggactgtggctgcatttcttgggtccttagagtgggctggagagacctagagggcccagcatgtggctgggaaactgttggtggccagtgggtaataaagacctttcagtatccctataaaaaaaaa

SEQ ID NO: 35 - DNA, 2126 bp, Homo sapiens
gatcggctcgatgagcggaggcgctgctgcggcgctgcggccgacgccgggtccgcaccaactgtctccccctcccagcttcttacctcggcttcctactccttcccccgcccgcccagcaccgccagcccgggagagctgccgggagttccccgggagcctcaggtggtgactatcctgttgagaagcaaaagatactttgcaagtaaaaaatatgcctcccaagtttaagcgccacctcaatgatgatgatgtcacaggttctgtgaaaagtgaaaggagaaatcttttggaagatgattcagatgaagaagaggacttttttctaaggggaccatctggaccaagatttggacctagaaatgataaaattaagcatgttcagaatcaagtggatgaagttattgatgtcatgcaagaaaatattacaaaggtaattgagagaggggagagactagatgaactacaggacaaatcagaaagcttatcggataatgcaacagcttttagcaacagatccaaacaacttcgaaggcaaatgtggtggcgtggatgcaaaataaaagccatcatggctttggttgctgctatccttttgctagtgattatcattcttatagtcatgaaataccgtacttgatttgatgacagagatcttcattaaacaagatctgggacagtaataaaagattgctgcataatttaaatgaaacctatgtgtatataactttcaaaacttctttttcaagaaactaagaggcaagtatcacttcaaattggaacgttgagaatgtccaattatcttctccctttctaacaaaatgttcttttaataattatgtttaaggcaaagagaactagcctctatttttccatatttcaaggatctaatttgaaactagatacttgccagttcattatttgtgtatataaacactgattataatatttcatattaatattttaatggcataaggacttgcattattgcattagggagcgggtcatgctgggggtcaggaagcctgtgtagagtaccaaattatatgctgaaagagatgcataaccattctgtcaatatttgcagaaatatagttcctttcatattacagttgttttgcaagcaatttccacatttataggtgtaacaaaagctaaatgttgtaaatgttgttgccctcaggtataactaaaaacattccagtaaatatatttttgactgtgtaagagaatgtgtagtaatttttttggcattggattatggaaatggaaatttttaaacagtgtgaaaaaacatggtatggcatcataaaactggagataataaagttattgaagagtgtcattggagtatttgaaaatgaccaatatatagctgccagtcatggtccagtctgttttctgttaaactccaataaagagagaccagtcagtcctaatgtgagtaaatgaaatttacaggtaacttacttactccttaattttattttagttaatagcctctaacttccaactatctcatttaccaaaagtacaaaaagtagcaaaaccatctattaatactttgaattttatatctttgcatttcctgttcatccttgaggagatgtatgttgcacaatcaaattttgcatcagccaacagtaatgagtagtagaaagtcaggaacctatgtgtatatatatatatatatatatatatatatatatatatatatatacacacaaacacacacacacacacacacacacacgcacacatatgataatcagtcagtcggtaaccaaatgctagagagtgaccattaacctaagcctgtttttataatgaaaaaatgtgttaactttaaaatatgccaacctccttgtgtcttttaaacaagtcagagtgaaaatacattgtcccctaaggtgtggggagaggaagctttataataaaattagtgattctgcagaaacttgtgcactggatatcttgacaatatgaatataaaactccctaaattaaaaatagggttaatagaaattatcagtatttaaatagggaaaaatgattttatgtttattttatttaggttttatttctttggtcatcttaatgcaaaatgaataaagcatagaatctgg

SEQ ID NO: 36 - DNA, 2863 bp, Homo sapiens
ggagttcgcgcgacgaccgcggggtcggcgggcggggcgaggccctggacggcggcggcagtggggctcctccttctgtttcccagaccgagagccgcgccggcaccatgtcagcttaccctaaaagctacaatccgttcgacgacgacggggaggacgaaggcgcccggccggccccttggagggacgcccgagacctccccgacgggcccgacgcgcccgcggacaggcagcagtacttgcggcaggaggtcctccgcagggctgaggccacggccgccagcaccagcaggtccctggccctcatgtacgagtccgagaaggttggggtcgcctcttccgaggagctcgcccgtcagcgaggagtcctggagcgcacagagaagatggtggacaagatggaccaagatttgaagatcagccagaaacacatcaatagcattaagagcgtgtttggggggctggtcaattacttcaaatccaaaccagtagagaccccacctgaacagaatggcaccctcacctcccagcccaacaacagattgaaagaagctataagtacaagtaaagaacaggaagcaaagtaccaggccagccacccaaaccttagaaagctggatgatacagaccctgtccccagaggggctggttctgccatgagtactgatgcttacccaaagaacccacaccttcgagcctatcaccagaagatcgacagcaacctagatgagctgtccatgggactgggtcgtctgaaggacatagccctggggatgcagacagaaattgaggagcaagatgacattcttgaccggctgacaaccaaagtggacaagttagatgtcaacataaaaagcacagaaagaaaagttcgacaactctgaagacagacggatttccactctattgtgatgaaaagatttgaaagatctttttttgaacttccaagaaatttcatttactattttagtatgtaaattaatgtgtgtttgcaaatgttataatagagtaggtcttaagacatttttgctgttataaggaagtgtttgtcccacattttcctagggttaacacctcaccaagttcttccagcaaaatgcttattagagtttttgtctgagcacagtagcctggccctgcatatcttgggcgtttgattaccatgctggaataagaagagttgcatttctcattttaatgagcatatggaaagatgggaacagaatttcagtcttgcagccatgagcctctatttctcattcctaagccttaccatgagtcagagtgttaagggggcctgtgagccagtcgtttggtggaggagggtccttcccacacctttgtttaggagtcatcattcacacacacacacacacacacacacacacacacacacacactctgagcacattatctgtgattctttcatcctcccagaaaggatcagtgttagaatgggaaatagagtgtgccatcttgctcttttgttggcagatgtccccgcttccctccagccccccatccttggcatgtatattagtaggagggcttcacaccagcactgctcactgcgactcctggaaatgtgtggggaattgggtgagcccctcttccccacgtgctcccatctgtaactctccatctgtgatttgcaacaggtcttccactggctcgaggctgcgaggctgaccgacaggggcgcccaatagagtttgtgggaatggagtattgcacagatgcagctgcacaatggtcttcctccacccctctgggaatcaccattaggcaggcctcagtagggcaaaatgtttatttggtaccgggggtctcctgacctgtctagcattcccacccactcttctgcacttcttgcaaggtaacttgaatcatcacttatttctctgccacctggttttaggactggcactctataaatgacgctgactttgtatagaaggattttgctaagggggcaaaaagcccagataccattttaactggcccagctcattttctcctttcattttacaaaagaaatcatgcagaagcatcaattaaaactgatttatttatgttggtacatccaacaaaatagttggagccacaaggcccttgtctttttaaaaaaacaaaatattttgaagatggtgaaagtgactgattttaataatgagataggtcacttaaaataacagtgcctttgaccttaaaacatggcactggcccatgtgacctttgccatttcccagtacttccctttacagtctgcagcctataaacagtggtgtctcaaagcaaaggaaacctccacaagtgctgcaacagtgcattagtttttatgtagcaatttgtttataaaaattcccatcccataatgcatgaccttcctaaaaatacccacagcctccataggcaaggtgagctttctgtgctacccactggttagattccagccacctcagggattctgatccatgtcattaacgaccatcccagggtgtgagggcctgattaaagcttatcgaactagacatttgtttattagatgagctcggcattattattttctcaataactggtagaagggaaattttaaacataacactcaacccaaacaaaactacttcgtgaggctttcagcaaaaaggctgcttaaaagcatgaacccgggatgcagagcagcttttgtgcacggttccacttactgtaattgtttctggttctttcctctaacaccttccatgtatgtcaactttttatcaccgtcaggcatagactcgtggagattagtcattatagctcagacctaagctaattatttaaaataaatacatgtaaaggccactgccacattctcagcaga

SEQ ID NO: 37 - DNA, 2159 bp, Homo sapiens
tctttccgtcccgggcagccagcgccagtcggagccagcgcgagcgccgccgccatcactgccgctgccaagtcctccacccgctgcccccgccatgtctgctaccgctgccacggccccccctgctgccccggctggggagggtggtccccctgcaccccctccaaacctcaccagtaacaggagactgcagcagacccaggcccaggtggatgaggtggtggacatcatgagggtgaacgtggacaaggtcctggagcgagaccagaagctgtcggagctggacgaccgtgcagatgcactccaggcgggggcctcccagtttgaaacaagcgcagccaagctcaagcgcaaatactggtggaaaaacctcaagatgatgatcatcttgggagtgatttgcgccatcatcctcatcatcatcatagtttacttcagctcttaaatccccgaggagtctgccctgcctagagaagggcctctcccccaaccctcagccgttcctccacctctcagccatatctttcagccccccctcccctggatccgtgtgtgtgtgtgtccgtgtgtgtgtccccctgtaaatagccagctgttatttatacatatataatattatatatatttggtctgtttgtagttttattactagatgatttttccggttgtccttaacaccccttcctgaggttcccttcacccctctctcttgccttccttccctttccctttcttcctgactagccccaagtcccttcatttgcatctgctatgcaatagtccctctcctttccttcttcttccctcagatttagctgatccttcctcccaccctggccttcctttcctctttcctcctcactctccccgtcatgctccctctgccccgccctcaaaaaaaaaaaaaaaaaaaaaaaaaaaaaaaaccaccagcacctgtccaggcttccttaggtacatcttctttgtatccattgggaggctctgagactggccccacttggtcctaaaaatcccaaggtctttgggagcgtccagcatgttaattagcgtatcattacatactgctatccctttccatttctttttgttccatcactcttctctcaacctgtgtttctttttttactgaggagttagtccccattagttcttgtatcacattttcatttgcacgacattactcgcaggtggtggggagcctgggcttttggggaaccaggctgctctggtccccagcattgcctcctcctagcccctctagtccagtttgcctcccttaccctcattttccaaacctcttgtaccctcctctccctcccccagtggtatgtaagtgtcttgaagttcagtatgttatgatggaccaataattctgcccttcgggtttctccctacattcctgctccccagttttcatgtggggtactcaactgacattcccatggggtttccctcccatctgcctgatccacctcctcctcccaccacaagatcaattgttggccacaattgatctcttgtagaggggtggctaccagtgtgtgtgtgggggtcatcactgccttggggaggagtggggcagggcagagaatccccccaattcctgcctgaaatctctggcctcacccctgctgggggttggactgaaaaccctcctccccaatttggggggtgttgccccatcactgcccagctcctctgactgccccccctgaatttagggtgggggtactagtcactgccaatgtgtgtatgggacttgctggaaaacggggatgcttgcccctctccaggactattgagcccagagagagctgtcctctcattgggtgaactgattgaggaagggtctattgtctttttaaatggcacaattttaagggtttgagggtacagtcccttaacctgccacgggagggggcccccaaactttcttcccccccacacttctggttttctgtgtggagggggagcagggatatctaagctgtggtgtgaaagggtaggagagatgctggaggtgggggtgctgtgttctagaccccccatattatcccagtgtcccctgcccccctcttcccccaccccatgcccccaattctgtggcgcatccagattgtgaaaatgtacaataaatgtgtaatgagtaaccaggt

SEQ ID NO: 38 - DNA, 670 bp, Homo sapiens
gctcttcctccggggccgctggcactgcggccgctccgcaggcagagaagccgggagcgggcgaggcggcggcggcagcagcgatggcaggaatagagttggagcggtgccagcagcaggcgaacgaggtgacggaaattatgcgtaacaacttcggcaaggtcctggagcgtggtgtgaagctggccgaactgcagcagcgttcagaccaactcctggatatgagctcaaccttcaacaagactacacagaacctggcccagaagaagtgctgggagaacatccgttaccggatctgcgtggggctggtggtggttggtgtcctgctcatcatcctgattgtgctgctggtcgtctttctccctcagagcagtgacagcagtagtgccccacggacccaggatgcaggcattgcctcagggcctgggaactgacccagctggtcctgaaggagaagccaaatggctgcactggccgattctggtctccagaggaccttggtgtttgctctcccttgacccaccccagtgagtgccaaagggcagccccaacatgtgcacccctgcatttcctgtcatgccacagactggcccttgagggcagcctgctgtactggccatgctgggccagccccacctggagctcagtaaaaactgctgtttgataaaaa

SEQ ID NO: 39 - DNA, 2053 bp, Homo sapiens
catctttgatgagggcagagctcacgttgcattgaagacgaaacctcggggaggtcaggcgctgtctttccttccctccctgctcggcggctccaccacagttgcaacctgcagaggcccggagaacacaaccctcccgagaagcccaggtccagagccaaacccgtcactgaccccccagcccaggcgcccagccactccccaccgctaccatggccgaagacgcagacatgcgcaatgagctggaggagatgcagcgaagggctgaccagttggctgatgagtcgctggaaagcacccgtcgtatgctgcaactggttgaagagagtaaagatgctggtatcaggactttggttatgttggatgaacaaggagaacaactcgatcgtgtcgaagaaggcatgaaccatatcaaccaagacatgaaggaggctgagaaaaatttaaaagatttagggaaatgctgtggccttttcatatgtccttgtaacaagcttaaatcaagtgatgcttacaaaaaagcctggggcaataatcaggacggagtggtggccagccagcctgctcgtgtagtggacgaacgggagcagatggccatcagtggcggcttcatccgcagggtaacaaatgatgcccgagaaaatgaaatggatgaaaacctagagcaggtgagcggcatcatcgggaacctccgtcacatggccctggatatgggcaatgagatcgatacacagaatcgccagatcgacaggatcatggagaaggctgattccaacaaaaccagaattgatgaggccaaccaacgtgcaacaaagatgctgggaagtggttaagtgtgcccacccgtgttctcctccaaatgctgtcgggcaagatagctccttcatgcttttctcatggtattatctagtaggtctgcacacataacacacatcagtccacccccattgtgaatgttgtcctgtgtcatctgtcagcttcccaacaatactttgtgtcttttgttctctcttggtctctttctttccaaaggttgtacatagtggtcatttggtggctctaactccttgatgtcttgagtttcatttttcattttctctcctcggtggcatttgctgaataacaacaatttaggaatgctcaatgtgctgttgattctttcaatccacagtattgttcttgtaaaactgtgacattccacagagttactgccacggtcctttgagtgtcaggctctgaatctctcaaaatgtgccgtctttggttcctcatggctgttatctgtctttatgatttcatgattagacaatgtggaattacataacaggcattgcactaaaagtgatgtgatttatgcatttatgcatgagaactaaatagatttttagattcctacttaaacaaaaactttccatgacagtagcatactgatgagacaacacacacacacacaaaacaacagcaacaacaacagaacaacaacaaagcatgctcagtattgagacactgtcaagattaagttataccagcaaaagtgcagtagtgtcacttttttcctgtcaatatatagagacttctaaatcataatcatccttttttaaaaaaaagaattttaaaaaagatggatttgacacactcaccatttaatcatttccagcaaaatatatgtttggctgaaattatgtcaaatggatgtaatatagggtttgtttgctgcttttgatggctacgttttggagagagcaatcttgctgtgaaacagtgtggatgtaaattttataaggctgactcttactaaccaccatttcccctgtggtttgttatcagtacaattctttgttgcttaatctagagctatgcacaccaaattgctgagatgtttagtagctgataaagaaaccttttaaaaaaataatataaatgaatgaaatataaactgtgagataaatatcattatagcatgtaatattaaattcctcctgtctcctctgtcagtttgtgaagtgattgacattttgtagctagtttaaaattattaaaaattatagactcc

SEQ ID NO: 40 - DNA, 2053 bp, Homo sapiens
catctttgatgagggcagagctcacgttgcattgaagacgaaacctcggggaggtcaggcgctgtctttccttccctccctgctcggcggctccaccacagttgcaacctgcagaggcccggagaacacaaccctcccgagaagcccaggtccagagccaaacccgtcactgaccccccagcccaggcgcccagccactccccaccgctaccatggccgaagacgcagacatgcgcaatgagctggaggagatgcagcgaagggctgaccagttggctgatgagtcgctggaaagcacccgtcgtatgctgcaactggttgaagagagtaaagatgctggtatcaggactttggttatgttggatgaacaaggagaacaactggaacgcattgaggaagggatggaccaaatcaataaggacatgaaagaagcagaaaagaatttgacggacctaggaaaattctgcgggctttgtgtgtgtccctgtaacaagcttaaatcaagtgatgcttacaaaaaagcctggggcaataatcaggacggagtggtggccagccagcctgctcgtgtagtggacgaacgggagcagatggccatcagtggcggcttcatccgcagggtaacaaatgatgcccgagaaaatgaaatggatgaaaacctagagcaggtgagcggcatcatcgggaacctccgtcacatggccctggatatgggcaatgagatcgatacacagaatcgccagatcgacaggatcatggagaaggctgattccaacaaaaccagaattgatgaggccaaccaacgtgcaacaaagatgctgggaagtggttaagtgtgcccacccgtgttctcctccaaatgctgtcgggcaagatagctccttcatgcttttctcatggtattatctagtaggtctgcacacataacacacatcagtccacccccattgtgaatgttgtcctgtgtcatctgtcagcttcccaacaatactttgtgtcttttgttctctcttggtctctttctttccaaaggttgtacatagtggtcatttggtggctctaactccttgatgtcttgagtttcatttttcattttctctcctcggtggcatttgctgaataacaacaatttaggaatgctcaatgtgctgttgattctttcaatccacagtattgttcttgtaaaactgtgacattccacagagttactgccacggtcctttgagtgtcaggctctgaatctctcaaaatgtgccgtctttggttcctcatggctgttatctgtctttatgatttcatgattagacaatgtggaattacataacaggcattgcactaaaagtgatgtgatttatgcatttatgcatgagaactaaatagatttttagattcctacttaaacaaaaactttccatgacagtagcatactgatgagacaacacacacacacacaaaacaacagcaacaacaacagaacaacaacaaagcatgctcagtattgagacactgtcaagattaagttataccagcaaaagtgcagtagtgtcacttttttcctgtcaatatatagagacttctaaatcataatcatccttttttaaaaaaaagaattttaaaaaagatggatttgacacactcaccatttaatcatttccagcaaaatatatgtttggctgaaattatgtcaaatggatgtaatatagggtttgtttgctgcttttgatggctacgttttggagagagcaatcttgctgtgaaacagtgtggatgtaaattttataaggctgactcttactaaccaccatttcccctgtggtttgttatcagtacaattctttgttgcttaatctagagctatgcacaccaaattgctgagatgtttagtagctgataaagaaaccttttaaaaaaataatataaatgaatgaaatataaactgtgagataaatatcattatagcatgtaatattaaattcctcctgtctcctctgtcagtttgtgaagtgattgacattttgtagctagtttaaaattattaaaaattatagactcc

SEQ ID NO: 41 - DNA, 2588 bp, Homo sapiens
gaattcgccggtccagcctcctctgggagcgggcagttggcgaccctgcactgacccgcgtccctccgtcccgagcccgcgcgccctcagagggtgcccggacagactgaagccatggcgattctttttgctgttgttgccagggggaccactatccttgccaaacatgcttggtgtggaggaaacttcctggaggtgacagagcagattctggctaagataccttctgaaaataacaaactaacgtactcacatggcaattatttgtttcattacatctgccaagacaggattgtatatctttgtatcactgatgatgattttgaacgttcccgagcctttaattttctgaatgagataaagaagaggttccagactacttacggttcaagagcacagacagcacttccatatgccatgaatagcgagttctcaagtgtcttagctgcacagctgaagcatcactctgagaataagggcctagacaaagtgatggagactcaagcccaagtggatgaactgaaaggaatcatggtcagaaacatagatctggtagctcagcgaggagaaagattggaattattgattgacaaaacagaaaatcttgtggattcttctgtcaccttcaaaactaccagcagaaatcttgctcgagccatgtgtatgaagaacctcaagctcactattatcatcatcatcgtatcaattgtgttcatctatatcattgtttcacctctctgtggtggatttacatggccaagctgtgtgaagaaataggaaagaagaagttaccattaaccaaggatatgagagaacaaggagttaaaagcaatccatgtgactcaagcctttcacatactgacagatggtatctgccagtctcttcaaccctcttctcactttttaaaatcttgttccatgcctccaggtttatctttgtcttatctaccagtttattcctgtgaacttcagattgaaccattcattgcagcagtagccttaaaaaggcttttgtttatttctttggtttgttaactagtgtcatctatttagagaaacatttttgtttttaattgctcaaagctgtcgccgctagtcttatgagctatctactaaaactatggagaaactttgtatgtgcacacaaaagtattcaagagacagtattgctaacatctcatcttaatgtcttttgttattgagaagttttaggtgcttcaaaacaatataaatggataatagttgttatttggggaattgtaatgatgttggtgctgcttccttctaagagctcagacaagtaaagtatgaaacattcttatttcagttagatggggaacattttgctagcccattagaagcacacagaattatccttgtcctcctaatattgactttcaggaataaagttcagtgtgctgatcattcacaatacagtggatagcttgatatcttctgttttcccattgcagttgatttgagaagatgaaggtttaaatattgttgaaagttgcagttttttaaatgtgttcctttttcttctgtgaatatttagggcaatcgtgtcgctaatagaatatgtagtagagggggtggggaggtaaattcctctgacttgccaaagaaaaagaagggaaccacagtggatatgctagcattttagctgtgcaaagggaggtagtgtgggaaaagtgtttccattctgggaaaagcccaaaccgaatacggtcagcagtcaactccagggtttgggcttgattcctgttgaataatagttttgagcattctttgtggttaaataaattcttaaatctgcctagttttgatgaattcttttgtgaaacttgaaagagaatagacagtatgacatatagaattaatacaaaacagtttaacaaccatttaactgcagtgtaagaaaattggactgtaatcatatcgctactggcatctgttatctagtatgcatttctggtgtgtatctgaaaggaagacattttctaccctagatccaattgcatttatttatcaataagtgccattaaattgaaattatattacattttacactttctcaatgaatgaacaaattagtctgtagaatctagccacctgtttagcctagtcatgtgccttgaacatatatgtgtcccataatctggctcatggtacctgttcttctatccaaacctttcaattcatgctacctgattcatttatttgacatagatcttaggcccacttgaactcttttcttgtttatctagcatagcacaaacgtttttccagtcttctttatcaacactaatgcctcttaattgcatcagtatttcctattggaaaatacatctgttccagaaaaacatttggcattcctgaataatttccaaatgtttttaatccaaagaaaaaggtttaaagcttatttccctttcttatacacacctgaataaaattgatgtgcatgttttagggatcaattacctaactgttccttggtctatttatgtataagaatgctttttaaagcacatgtctcattttaaatgacgcacaaactgaagatgttaataaaatttaaggaattc

SEQ ID NO: 42 - DNA, 1753 bp, Homo sapiens
ggccgcggcgccccccggcgcccccagaccccggcctccggcacagaggcgggagacccggagcagcagcagaggcaggaggactaggaggaggaggaggagccgtcgcaggatgaaggatcggactcaagagctgcggagtgcgaaagacagtgatgatgaagaggaggtggtccacgtggatcgggaccacttcatggatgagttctttgaacaggtggaagagatccggggctgcattgagaaactgtcggaggatgtggagcaggtgaaaaaacagcatagcgccatcctggccgcacccaacccagatgagaagaccaaacaggagctggaggatctcactgcagacatcaagaagacggccaacaaggttcggtccaaattgaaagcgatcgagcaaagcattgaacaggaggaggggctgaaccgttcctccgcggacctgcgcatccgcaagacccagcactccacactgtcccggaagttcgtggaggtaatgaccgaatataacgcgacccagtccaagtaccgggaccgctgcaaggaccggatccagcggcaactggagatcactggaaggaccaccaccaacgaagaactggaagacatgctggagagcgggaagctggccatcttcacagatgacatcaaaatggactcacagatgacgaagcaggcgctgaatgagattgagacgaggcacaatgagatcatcaagctggagaccagcatccgcgagctgcacgatatgtttgtggacatggccatgctcgtagagagccagggagagatgattgaccgcatcgagtacaacgtggaacattctgtggactacgtggagcgagctgtgtctgacaccaagaaagcagtgaaatatcagagcaaggcccggaggaagaaaatcatgatcatcatttgctgtgtggtgctgggggtggtcttggcgtcatccattggggggacgctgggcttgtaggccccccccacccttctctctcccagacccttcccccaccacatcgggagcaatacccccaccacccctttcactccatcccctgctccaggctcactcccaaaacagacccaggcagccccacccccacggcagaccctggtgtccctggacctcaccgggccatggaccccccccccgtccccgcacgtagatcgcagcaggcgtgattacacatgcacaccaacatgcatgccgccggcacatgctcgagacgtgtggacaccccagcgtgcgtgtgcgtgtgatgtgtgtgatgcaccagagcaccccctccacccccaccttgggtgtgtgtgcgtggtctgagcttcccccttcaccggggctgttgtgtagactgcagccaagtgtaacacagcagtccatcacgccctctctgtcctctgtgaacagtgtgtgtgcgtgcgtgagaccacagatctgtggacacaccatttgtgtacgtggaattttgtgtttcagtgtttgaacctaatgcaacagcaacaaagccactgatacctgagccctttgtgtctgctacaaaccaggcaggtggtgtgtgtggactcacactcacattctcagaggatccagggaggcccaggtacacacaggccatggcagacaccccatgtctttgttaccccaggggctgtggcatgtcccaggagggtgtgcatgtgtgtgtgtgtgtgtgtgtgtgtgtccaggatgtgcctgaagtattgataggtcttctcagatagagcc

SEQ ID NO: 43 - DNA, 6910 bp, Homo sapiens
ctcgtgatgccccgccccgtcgctcctgcgcctgcgccgtgcccaccgaccggcctcgagcgccccggcgggaggtttttctatatgagtggagaagacagctgttaccagggaggtcatacaacatttttttaggatgtctgaagatgaagaaaaagtgaaattacgccgtcttgaaccagctatccagaaattcattaagatagtaatcccaacagacctggaaaggttaagaaagcaccagataaatattgagaagtatcaaaggtgcagaatctgggacaagttgcatgaagagcatatcaatgcaggacgtacagttcagcaactccgatccaatatccgagaaattgagaaactttgtttgaaagtccgaaaggatgacctagtacttctgaagagaatgatagatcctgttaaagaagaagcatcagcagcaacagcagaatttctccaactccatttggaatctgtagaagaacttaagaagcaatttaatgatgaagaaactttgctacagcctcctttgaccagatccatgactgttggtggagcatttcatactactgaagctgaagctagttctcagagtttgactcagatatatgccttacctgaaattcctcaagatcaaaatgctgcagaatcgtgggaaaccttagaagcggacttaattgaacttagccaactggtcactgacttctctctcctagtgaattctcagcaggagaagattgacagcattgcagaccatgtcaacagtgctgctgtgaatgttgaagagggaaccaaaaacttagggaaggctgcaaaatacaagctggcagctctgcctgtggcaggtgcactcatcgggggaatggtagggggtcctattggcctccttgcaggcttcaaagtggcaggaattgcagctgcacttggtggtggggtgttgggcttcacaggtggaaaattgatacaaagaaagaaacagaaaatgatggagaagctcacttccagctgtccagatcttcccagccaaactgacaagaaatgcagttaaaaaccaaatttcagtattattggtgccaacatgtctatcctgaggacctttgctgctgttggacactccgtcaccttttggaacacaagtatatcaagatagtggctactgatgttcaagtgggattgaagtgtgataaatggatatattttgttgtttgctggggtgttcatggagatgttaagagattgaggccctgggctgagggtatataatgtatgtcaggtaaagtttgaagactgccaaggagcagattttctccctggaaatgtgaaaactgaacctataactctgataaggacttgagatgtgtagaaacgttgggttatggaagactagtttcttccataaccctgaattggagaccttaatgctaagtgtagattattgaggtttgttagtgaggaaaagaataagagttcagaagcctttgttatcagatagcgaaatcagggcctagtgaggagcacaggtcgactacataatggagtccattggcgaaccctattgcaatttggtccaactatatcttctggtgaaggaaattaatgatgtaagaaaatgcaagaggctcaacttctcttccaaaaatcttctggcttctgaactcttcctctgcctctctttaaataaataacacagaatttcaagtggtaggagacttattaagccagtcaccaagcttggtctgtcagcctgtcttctaacacctcaaagatcttgtgccctgtgctgtccctcccttgtaattatgaaaagttctttggtttctggggtgaattctacccatgtataatgaggaattctctcataaccttttttgtcttgtctgtcatctctgttcatcccttcctataacctctaggtaaaaagaaaagaaaaaaagaaatttcgagatattttcaacattgttagagtttgggctaaaatgagcaaggagaaaaaaaccaccaagaacatttcctggggcatgttccagttttgaggggtgatatatctgccagatagggggtatctgacccagtcttcttttcagctggtctctggggggagctgagaactcgcttgctacctcacatccttttccccagactttttatctcctatgcatccctttgctttctatagctggtgtttcttccccaaaatggcgttcccatgcttacctttctcacattctagacaatgatggacaaagacgcatgcaagactcagacccggggaatggtgtggtgctaatctcaacacctgacattcacagcaagcatggcccagcccaactgcatgtctatctcaaaccgcagaaaggctttaatactggaaaaaaagaattcaagactacaggcagctcccctctgtaccccaactcatttaaaataggaggaatcactttttgccttacttaacgcttttttctgagcacagggatgggcacctgcaccccagaaggtgtgagctgtctctctgccaggagctaaggttcattaggggattggatggtttatcacttctttctttctgagtttacttttagtaacttttattgatggctacctttcatgtccctgtctaaagagactttctctttcatacgtcttaaatctcatcaatgaaatccagtgaaacagcaccatttcttagtatcattaaataactagaaagtatcaagtattgctctctgctgctttatatcattaacatattaataataccaagaaggaaatactttgaataagtgtcagattctgatccagtattggacacctgtgatattggacacctgtgaggctgggataattacttttgaattacacctcttctctagtttctggaccttgctctgtcactttaacacagggtgatcaaacctgaatgaggatcagaactcacccaggcacatactaaagcaagattcctaaacctcagttccaggggtaattctgacatcacccgtccagcatagtcagctgaaattataaatctaagaaacagttacatcaagattctgctgtgtcatttaattctgaaactcccagtattctacccttcttcatcactgcatattaccccactcttccatcccaaattggctatcctttcagcccaccaacttagcggcagcactagggattcattataaggtaaatctggtttacataaagacctgaaggaggcctgtatttgaagctcacacttggtattggtatctctcatttttactgagccagtgtggaataccactgtatgtactcatataagcccttgacttttactgctcatcaggattggaatattactctagcagtcttcacacataggcaagttacagtccttttaaaaagtatctcatttccctataatggaacctaatagccaactttttcatagaaattgctagaagagtttgatcaactataaatgataaagtgtttataagcatagtcagtgtgacacagaaaccaatcttaaaattgaatttaatgttttatcatatcagattaaatattttctccatgtcttatttttactgcaacaagttagaaagtgggaacactttgattaatgtcttaaaatttgtgggccctcatttggataaaggcagcaatcctaaggactttttttttttttttaacataatctgagaatttctctgtagagcagagactttcaaaccttttggctgtaacccacagtaaaaaacgcatttatatcaaaccttagaatatgtttaatgaacaatacttaccattctgatgctttttattgtttcagtttttaaaatatgccagttgcaacccactaaattgatatctaccaatgggttgcaacccttagcttgaaaaaaacaccctcacagaggaactggtatttcttgaataccttctgtttgccaggcacttcaccaggcattttacaagtaaggaaactgggcttcagagaaaataatttgcagaggtttactcaactacaaaggggtgaagccaggaatgttaactaggtctgttgagctacaaaaacttttatgtctctcagactatacagcctctatacaaaattgagatgggggttgggggcaggggctcatgcctgcaatcccagcacttagggaggcagaggccagaggatcacttgagcccaggagtttgagaccagcctgggcaacatagtgagactcttgtctgtatgaaaaaaattaagaattagctgggtgtggcatagcacacacctgtggtcccagctacatgggaagctgaagtgggaggatcacttgaactcaggagcagccttggtgacagaacaagaccctctctcaaaaaaatatttaaaaaaaggtgggtcatccattctcctttaccaaacaggctttgaaatgacacattccattcatttgcatctttttaaaaaacttctgattccttactgagtgtccagcagcctcaaagtttttaatggtagctgatgcagacataaacagtgctcaatttggcccttaaactataaaatcaagaaagagtatttcaatcccatccacctgcctgcaagatttcttaatgttcactagttataaccattgtttaaacagtgctttttgtgtaatttaaaaataaactttaatgctttttaaaacaaatttatcataattcatagatcaaatgattatcctttaaaatgatacccttgggaaatcatgtacttactgtagtgatgctagtattaatattacttagaccaattttgaaactgttctttcagaattgcctccaaagacattttgcagatcatcccagaaaagggggtatgatggtgctgtgtagaactgaccagagttcctggaggattttgaggttatactgaaactgagtgctgtacagggagaattgcatgagtccagaaacttccttctgtgggctgcctgccttcctgccctcccttaagtgctctaagatttttgtacaggagtaagaatcaaatactggtaacatcaatcacaagaagttgaggaaacctgtaatatagctagataatatacaacgtttgtcttccatcagagtgcagaaaccaaaccatgctttgtgttaaccttaaatatgaaaggtgtttctcagggtcccctttgtccttcgttgctgccatatgaaatcttacaaggaaggatgaggaaaagcctggggggaggttctcctcggaaatgaggtggttttttttgttattaagtagaacgtggctgtggttcacaggtacttaacgaatgttagatgatgttcttaagtaatcagaggcctaataaaaggcaggggagtttctcttctagcctaaattaatattaaaagttcaggggtattttttgtttttaaattaatactttattgtttttaacaggtggttctcataatttacattcattaatttgatgcccttttacaaagaaacttcttaggtattataaaccatcaatgtaaaggatccacatggtatgtatccacattgctactctcaaatagaaatgggagataagaaatatatctgtgcaatattaaattgaaaaaaaaaaacccataaaaagtgtcaaaggcaaataatttgctctagatcacaaaactagttagcacaaggctaggattataaccagggtctaggaaaaaatcctgaaggtgatttaactgagtgttaggccctgtcaagccacctgctaaggctcatggtctttcagactagcttcaacattccaaatcaggcaatagctacaacggaaagataattggacggggaatcctgagatcagagtcctagtttggctttgtctcttgtagcaggattttttaaatcaggggcagctctcttctcccatcccagccatgaatctttcaaccttagtggtcaccaacttgactccattccttatatcaagacttgtcctgtcaattctcccttaaatgttagttgcatccatttctaaatatatccatggccatcaccctagtaaaaagactattacctcacaccccgcacttgatcttcccccaactttaagtgactcagttccttatatcactgccacaagaattaacaaccatgtccatctttcatttttctgctgaaagattttcagtggttcccactgaataccaaataaagttcgaatcccttagattggcattcacagccttctacgttctggccccagctttatctcttgaaactcactactcaccatctgacaatgccactaaaaatccacaagagtgattttaaggtttttctatggtgaaggttcaaactggtaataaaccatgtttacatttttctggtctaaaataatttctatattactttataatagtcagctgggggttatttaagctcttggacgagcctaaaacttgtatcctgaagaaaatatttttttccaccagaagaaattgctttcaatttcttaaccttcaaaacaatgtcagtgttgtcacctgtgcatttgatagccacagcacaagtattcttcaggagcataaatcctccagccttgaatggaccattgtccagctcctgtgaaaaacttaatatttgagaaagacattcaatggtacatgttttctgtacacttcatgagtagttgagattttcttgtattaaggttaatcactaaaaaggtgtttacttgggtttcgttaactaaaccccctaaagatgttttccattttattgttaaacacttggtgttagcaagggtcagcacgagaaaaggcccaatggcaagaatttctgcaaactctgtaaagcttactgaattcatttgtcatttattacattgctgagtggtgcttgaataaggaaacatgcaataaatttacttatttaaccaacaaa

SEQ ID NO: 44 - DNA, 860 bp, Homo sapiens
gcacttccgccctctcttaacatggagccggcggaaggggtggtgtagggccgggcgataatggcggcgtcgaggctggagctaaacctggtgcggctgctatcccgctgcgaggcgatggcagcggagaaacgggacccggacgagtggcgcctggagaagtacgtgggagccctagaggacatgttgcaggccctgaaggtccacgcgagcaaaccggcctctgaggtgatcaatgaatattcctggaaggtggattttctgaaggggatgctgcaagccgagaagctgacctcctcctcagagaaagcactggccaaccagttcctggcccctggccgtgtgccaaccacagccagagagcgagtgcccgccacaaagacggtgcatctgcagtcacgggcgcggtacaccagcgagatgcggagtgagctactaggcacggactctgcagagcctgagatggacgtaaggaagagaactggagtggcagggtcccagccagtgagtgagaagcagtcggcagctgagctagacctcgtcctgcagcgacatcagaacctccaggaaaagctggcggaagagatgctaggactggcccggagcctcaagaccaataccctggccgcccagagtgtcatcaagaaggacaaccagaccctgtcacactcactgaaaatggcggaccagaacctggagaaactgaagacggagtcagagcgtctggagcagcacacgcagaagtcagtcaactggctgctctgggccatgctcattatcgtctgcttcatcttcattagcatgatcctcttcattcgaatcatgcctaaactcaaataaagacccccgcccacctaaaa

SEQ ID NO: 45 - DNA, 3080 bp, Homo sapiens
gcacgcagccttagctccttccccgcccttgctcttcccagtttctccgtcagcctgcgggtcccggctggcggctgcttccggtaggagagcggtgtagagcgagcaggtctcagctcctcgtcatgtcatacggtcccttagacatgtaccggaacccggggccctcggggccccagctccgggacttcagcagcatcatccagacgtgcagcggcaacatccagcggatcagccaagccactgctcagataaagaatttgatgagccagctaggaactaagcaggactcaagcaagctacaggaaaatctgcaacagttacaacactccacaaatcagctcgccaaggaaacaaatgaattgctgaaagaattagggtccttgccccttcccttatctacttcagaacagcgccagcagagacttcagaaggaacgcctcatgaatgacttctctgcagccttaaacaatttccaggctgtgcagagaagggtatctgaaaaggaaaaggagagtattgccagagcaagagctggatctcgtctttctgcagaagagaggcaaagagaggagcagctggtctcatttgacagccatgaggagtggaaccagatgcagagccaggaggatgaggtggccatcactgagcaggatttggaacttattaaagaaagagaaacggcaattcggcagctggaggctgacattttggatgtcaatcagatatttaaagatttggccatgatgatccatgaccagggtgatctgattgatagcatagaagccaatgtggaaagctcagaggtgcacgtcgaaagagccactgaacagttacagcgagctgcttactatcagaaaaaatctcgcaagaagatgtgtatcctggtgcttgtcctgtcagtgattattctaatcttgggacttattatctggctagtttataaaacgaagtgattgcctccgatcgttctcccgctgagctgttttcaagggcaagtgcttgttgaagtcttgccagaacaaactgatcacaagaagacagcatatatcagaacgtcctgtaatcatttagttagaaactaactactaactagtctttggaattcgtgacctatggagacagtaattatcaatttattgattctattgatttctcaaattaggaattaacttatgtggattttgcttcctcttgtattctgattgcccttcatcccaagtgtttactgaaaattccattctagatattcttgttttgacaaatgacactacagtctcgtaatattgtcttttatgtatatacaaaatttacctttttactagcatctgagatagagttactttctggtacccagtatattggagtctgtcagaaactctataataggccaccagtttttattatttaacatttttatttgaatttctaagaagcctattctctatctattttgaaagattttggcactatatttaattggaaggtaaaatattgtacatgtgatccagagtaaatgagaagtctctatctgagctggtcagttactggagtacatgttactaatctgggtttaaagtttacttcattatctgctagtgtcatccacagcagttcatcctcatccacactaagccatcctgttagcttttaaaggaagttaatttaattaacattaatatactctatgggctccctctcccacctgtctgcatagaaaggcagaattagacatagcatgctttggaaaagcaaataggaattgttgggaatgatttaatcttgttgttgttgttgttgttgttcacttgtggttctacattcctggtgaatgatgaatgttgctgtcaaagggctgccccctaccttataagggttgctgggcatttgaaggcaggaagatttttaaagatagattgaggttggtttaaaattattcctgtaaaccaacaataaagcaaagaagaggttcatttttgtaaataacactggtttcaaatagtgatgttagacttaacctaatttataaacaagagattaatatctccatgcatagttttagacaaaaaaagatgtttcaataaaattactgtcttgtaatataaatgttgtccacttcccttttccacaggcctagaacagttaaagggaacataatttgtttaggctcccacataaatgtgaatctggccaacaactttggttcatcctttagtgaattagaggatttggctaccctgagtatatttatattcatttcttctgttctccttctgttattatacttaatcttctaaactaaactaatgtgaacagtagggaagcaagggcccaaatgcataagtttctttgcactgttgcacttacttaatacaaataaatgttttttaaagcttttgtagtatgtttttatgagttaacatcctaatgtggtaggtattaggtaatgtgctgtcatgagaaaaattgagacttccaagaaaactggacaccaggtgagggttggtttggagacggaataggtgtagctgcctttccttgaaaaacagtgtgtagagatggctgagtgcaatggctcacacttgtaatcccaacactttggaaggctgaggcgggaggatcagtatatcggtacgtctgagcccaagagttcaagatcagcctgggcagtatagcaagaccccatctccattttttttttaatgattttttaattaaaaaaaagaacaacaggatagagctgttggggtggcacagtggcccaaagagcagcttcagagataattccttggttctatgatccctgtttaactccaaattacagtcggacttggatacatcatttgtaacattgtaggaaagaaaaaagtcttggttgtgaaaaacgatttgcatttgggtaaaataaagtgaccatgcttttgttctgtaatactgtgtgacctgtggttgttgtaatggtgatcatggagagcaaatatgaacttggcctggattttaaatggcctagaatttgtggtagttgccaaagaggttctcctaggtggtcttaataaacctattcacagaattctccttaa

SEQ ID NO: 46 - DNA, 2510 bp, Homo sapiens
accccaacgccgcttctgcggccaaagtaggttgggagtggaaggtggtggctgctgctccgcagtgtcgggaagatggcgccgccggtggcagagagggggctaaagagcgtcgtgtggcagaagataaaagcaacagtgtttgatgactgcaagaaagaaggcgaatggaagataatgcttttagatgaatttaccactaagcttttggcatcgtgttgcaaaatgacagatcttctagaagaaggtattactgttgtagagaatatttataagaaccgtgaacctgtcagacaaatgaaagctctttatttcatcactccgacatcaaagtctgtagattgtttcttacatgattttgcaagtaaatcggagaacaagtataaagcagcatatatttacttcactgacttttgccctgataatctctttaacaaaattaaggcttcttgctccaagtcaataagaagatgtaaagaaataaatatttccttcattccacatgaatctcaggtgtatactcttgatgtaccagatgcattctattactgttatagtccagaccctggtaatgcaaagggaaaagatgccattatggaaacaatggctgaccagatagttacagtgtgtgccaccttggatgaaaatcccggagtaagatataaaagtaaacctctagataatgccagtaagcttgcacagcttgttgaaaaaaagcttgaagactactacaagattgatgaaaagagcctaataaagggtaaaactcattcacagctcttaataattgatcgtggctttgatcctgtgtccactgtcctgcatgaactgacctttcaggcaatggcatatgatctactaccaattgagaatgatacatacaaatataaaacagatggaaaagaaaaggaggccatccttgaagaagaagatgacctctgggttagaattcgacatcgacatattgcggttgtgttagaggaaattcccaagcttatgaaagaaatttcatcaacaaagaaagcaacagaaggaaagacatcacttagtgctcttacccagctgatgaaaaagatgccccatttccgaaaacagattactaagcaagttgtccatcttaacttagcagaagattgcatgaataagttcaagcttaatatagaaaagctctgcaaaactgaacaggacctggcacttggaactgatgcagaaggacagaaggtgaaagattccatgcgagtactccttccagttctactcaacaaaaatcatgataattgtgataaaataagagcaattctactttatatcttcagtattaatggaactacggaagaaaatttggacaggttgatccagaatgtaaagatagaaaatgagagtgacatgattcgtaactggagttaccttggtgttcccattgttccccaatctcaacaaggcaaaccgttaagaaaggatcggtctgcagaagaaacttttcagctctctcggtggacaccttttatcaaagatattatggaggatgctattgataatagattagattcaaaagaatggccatattgttcccagtgtccagcagtatggaatggttcaggagctgtaagtgctcgccagaaacccagagctaattatttagaagaccgaaaaaatgggtcaaagctgattgtttttgtaattggagggatcacatactctgaagtgcgttgtgcttatgaagtttctcaggcacataaatcctgtgaagttattattggttctacacatgttttaacacccaaaaagctgttggatgatataaagatgctgaataaacccaaggataaagtctccttaattaaagatgaatagcatttctttttggagggtttagagattcttactaatatgttgaactaaaatagaaagaaaatgttgctgtcatgtaatttaaacaatgtaaatattttatggaataatggcttttcaaatacatttcttaaggaactgtttatgattattactggatttgtcatttttgataatttaaatattgctgctgctttgtagatgatgagaagaaatgttaaagtgctttctaaaaggaaattttttcacctttggaggagaatatattagagttgtgggtaatttttcacagccacctatgtacatactaattacccattggatacttatatctaaaagtctcatgctgaagtatagtttttgggaaagaatgattttaaataaagagattgtaaaagtaaaaaactgtaaatgtatatgtatgatagaattgtttcctctaagtgtagtttttctttcaactaaaattcagtttatgtgtaaaataattcagtcattaatagaaatggagtgatttcacagtgtgtactgttttgccacatacttctaaagaacacaattttatataattttgaaatcatgtatgtttaaattagaaaaccaaaaatcatgaacattctaagagaaaataaatatagaatttaaaaaattaaaaaaaa

SEQ ID NO: 47 - DNA, 4580 bp, Homo sapiens
gggaggtgggactgactgagtcttccgtgtgtcgccgccgttgccgcctcagcttcagcctcgttactcctgcggttctgtgactgtgctgctggcgttaacggcgcgaggtgaagggaggtgacggagtgtgcccgcgcgcgcgggggtcccctcagtcccagcagttcccttcgtgcgcggggggcggcgagggtcttcagcagtcgggagaggcccttgacggcgccatgtcggcgggcggtccatgcccagcagcagccggagggggcccagggggcgcctcctgctccgtgggggcccctggcggggtatccatgttccggtggctggaggtgctggagaaggagttcgacaaagcttttgtggatgtggatctgctcctgggagagatcgatccagaccaagcggacatcacttatgaggggcgacagaagatgaccagcctgagctcctgctttgcacagctttgccacaaagcccagtctgtgtctcaaatcaaccacaagctggaggcacagttggtggatctgaaatctgaactgacagaaacccaagcagagaaagttgttttggagaaagaagtacatgatcagcttttacagctgcactctattcagctgcagcttcatgctaaaactggtcaaagtgctgactctggtaccattaaggcaaaattggaaagagagcttgaggcaaacaaaaaagaaaaaatgaaagaagcacaacttgaagctgaagtgaaattgttgagaaaagagaatgaagcccttcgtagacatatagctgttctccaggctgaagtatatggggcgagactagctgccaagtacttggataaggaactggcaggaagggtccaacagatacaattgctaggacgagatatgaagggacctgctcatgataagctttggaaccaattagaagctgaaatacatttgcatcgtcacaaaactgtgatccgagcctgcagaggacgtaatgacttgaaacgaccaatgcaagcaccaccaggccatgatcaagattccctaaagaaaagccaaggtgttggtccaattagaaaagttctcctccttaaggaagatcatgaaggccttggcatttcaattacaggtgggaaagaacatggtgttccaatcctcatctctgagatccatccggggcaacctgctgatagatgcggagggctgcacgttggggatgctattttggcagtcaacggagttaacctaagggacacaaagcataaagaagctgtaactattctttctcagcagagaggagagattgaatttgaagtagtttatgtggctcctgaagtggattctgatgatgaaaacgtagagtatgaagatgagagtggacatcgttaccgtttgtaccttgatgagttagaaggaggtggtaaccctggtgctagttgcaaagacacaagtggggaaatcaaagtattacaaggatttaataagaaggcagtaactgacacacatgaaaatggagacctgggcactgcaagtgaaactccgctagatgacggtgcttcaaaattagatgatctgcacactctgtatcataaaaaatcttattaaattgaccatatctccagacaagattgttaatcagactattctgaatttggggcactggggaagatggtgacaaagactacaaaatcaggggaggctgtttgttgcctaaatgaaaggcgggtacctcagggcttcatgtgaacaattctcaatgcataaaacaccctgttttctgtggtagaccataattagctattgcatgtaaagcaattttgattttcttgaacttgtaagcaccaaagcatgtgtttcccaaaggggtattactgggctcttaagtaccaaatgaaaccctactgttttacttggttccttttccctttagtaggaggacagtgctaactggaattttataaggagtaccctttaaaatacagagagtaagtgaattcatattttatattctagaatgttaactgtggtatttcagaagacagagcttgactcaatgaattgtagaaatataggcttgacttaatttttgtaactgaaaggctttagacttaaaaaaatttattgtgcatcctaaaatctaaaccaattattaatgatcatttattgtaatgagtttgcatttcagctttattcaatgcagtacaaaatagttttctttaagcagtcttttatcaatcaatgctgcactagaaatagattctcaaaagttactaaacattttactttttttgttttttaaaagaaatgcagatgagtgtaaaacatctgttctcaattatgttgatctgtgtgcgcagtactggagcatttacccattcatgttgagcctcaaatgcttgttttctggggtccacaaaagacagttttatacattttgagttgttcataaagtttgtcttgtgatagtcctggcacttaaagacaaatttttctggtagtaaaagttcagatttattactatgtcatgaaacacagtacattcaaatcaaacggcagttttctttctaagtaaatgatttccagtcatctaaaaggtgggcaagatgagataaagacattttgatacagtaattgttttggttgggttttcatgtcagtttatgtttgactaaagctctcttcatatgcaggtttataaatttgttaggtctgttgtcccatgattaaacatggagtgcctcctctctgatttaatattctgcaggtcattgtaacctgctaggcaaagtcacaacattgcattaaagaggtgatagctttgctaatatcactgttttaaaggacgtacagttaaaggaatattaagtgggagaaagcctacaaggcttttagaatattatcagtatcttcatttctggtattcagatgttatgtgataaaacacattttttttggctttcccagatacactatatatttgttcaagggtaaatctataaaatgtatatactttattttgtggttttgctatttataaatttaatgttttaactgttgctcatttatggtttgttttgggtggtggtgttcatctgtatatcaccatgttaatttgtaatggaagtgcacttcgtagtgtatattgttactgacattaaaatactttatagcattgtctctgagcaaaagctagtatttaattgtacaaatgaataagcaagttacatgttattgtttgctcttgacagggtaggcctcttaaaagaaaaaaaacaacttgttttttctttatgaatcccctatgccaaacacataccttccatgcatgacatgagatctgcaaactggattttagccaccgtatttatttagtcaaaaaaattgtccattgtagcagacccgaaaacctttttgctgtgacatgaaaccatgttattcttatcttcttaaaacacagcctgggatggaatggccatggcatttttttcagagaacatcctttatctgctatgactgaatccttaggaaatgtaagctataaccctttgattttcaagaactaccgaataagtgtatgaagaggtggttttttaaaacttcaagttggaatttttatgaggtcactgtgtaatttgaagaattgtgtgagattgtcatgatataaattccttttaaggactgataaatagaatgaaaagtttccaggtagtttaaaactccacaggtcagtttccttttcattcctgcttcactgtggtttataagcctacgggagagcaccgttgctcagatgctactgtgagcttcctgtccggtgttagaaagtaactagttaaaagttcattttagaatgtatggtttttggggatgaactaagaattagttattagttccaaaggactgagaaccaattttaatattttcacatttataggaaagaaattcatatgtccctgaaacttctaggacaaaaccaaacaagtaaggagggaactgttgcaaagccatttcatcgagaaggggacagaaggagaaatacacacatgtatacacaaacagaatggttgagaaaacgttttaataaaatgtgagggttgtatgtgtgcgtgtatatatttacacttaacctctaaaattctcttctacagtatctctgttatgaatatgatggaaaagcaacattttggtggtgagactattgttaaaataaatttgagaaagacgaaaattttgtgagtcttgataattacaagtcaacagctatcgaaagttagcacagcttgtctgtggtgctgtttttttccccactgcagtggacttatgctgttttcatgtttagaaacaaaaaggtttcatgtgattcatgtgtaagatgcacagtatttgacatcctgattatgtaatccctattccatctatccagtcttacacttatggttggcctcaaatctattgcatttatgataatgtattatatctagttgagtttaatatttttttattagcctgtaaataaagatggcatcttctacattaaaatgatattgatctcatttttttaaataaacattttgtttccttgacgttaaa

SEQ ID NO: 48 - DNA, 2220 bp, Homo sapiens
aaccggaaggggggctgtgaggacgtgttccgaggaagccagagccggagccgtggcctgcggggccggcgacatggatcccctgttccagcaaacgcacaagcaggtccacgagatccagtcttgcatgggacgcctggagacggcagacaagcagtctgtgcacatagtagaaaacgaaatccaagcaagcatagaccagatattcagccgtctagaacgtctggagattttgtccagcaaggagccccctaacaaaaggcaaaatgccagacttcgggttgaccagttaaagtatgatgtccagcacctgcagactgcgctcagaaacttccagcatcggcgccatgcaagggagcagcaggagagacagcgagaagagcttctgtctcgaaccttcaccactaacgactctgacaccaccataccaatggacgaatcactgcagtttaactcctccctccagaaagttcacaacggcatggatgacctcattttagatgggcacaatattttagatggactgaggacccagagactgaccttgaaggtggggtccctgctgggggacagagagaaggcctcttgttttagcctcatccaacagtttagtaactgtgtttatattttgattacgtgtcctcaaattgtgatattttgatgacaagacagagcccttgagtttgggatcctttctgttggagttgagttattgtgagcctgaaagtacccagttcctttgccagtgcttgaaacaaaccatgaagtggcctctcttaggatccaggtcttttcccatttactgaacttatcatgaaagtgagtgctactacgaggggtccaatcacaggctgagaaattgtgttacagaatctactcttggaagaatgaagacgtggctgtcctttggtacctcgctttaaggtggctttcccttaggacccctactgtggactgccttataactaaaaccttttgtattttagtaactgaatccccactgtgcagtgttagggctgcctggttgtttgcagtagattagagctttagaagcttctagagcttctaaagcccgtgctggtgatcccagcgactcttcactccctagccttaggtattcctagaagccctgaccagttggcactgctgagactccagcccctgggagtggtttacagaaacattacacagactctgatgtcagtcatgatgtttcagcctctgcccttttcctgtatcaaccctgatggataatagggcgtgggttctgtctgttatcagggtgtggtcccctgtgaatgaagcactcccagccactgagctgtgagaaacagtcactcggaagtgtgagctttatcttagtttttgttggatcatgttgagtctgtcagctccacaggacttcagtacgtttctgaacagtccctgccatctctacgggggagagggtcaggcaagctgcaagtgacactcacctcctgctgacagttgcagtgtctcagatggcctggaagggtggtctccagcagcctgctgggcgctcccctttcatgagagccacctgcagtgacctgaactgatacatgttgattagtctgccctttctttagaaaactgctactctccttttcatatctcagaaaaacagtagaggccttttaggaccaaactccatgtcacactgatgaagagccagtgggggttagagcgtcctgttaaggcacatgctaacttcccactcaagtctggcagcgctggggcatcagcacacctcttgccacccacactgataccagaggggaaggctgtgaggtggctgggggttgagacttgaggtttctaactttcctctgcacacctgtggctacctggtgtttgtctcttgattccctccacctgcctcacaccctgcctccgtcgggattttccacctacaccattcaaaaggaacataggagagggcatgaaggggctaggctgaagcactctgatgactggggccaatttgtggctgaaaatgaatacattttttgaaatttatggtcattttcaagtgatttagaaggttgatccttagcctcatacagtgatgaaataatctgtgtgttcagagccaagcaggactttagcaagagtctgattgtattgtcactatctcggggaaaaaaaaatacaaatacatttctctgatctctgatggcaatgaagtttgacttgtaa

SEQ ID NO: 49 - DNA, 4950 bp, Homo sapiens
gagctgcagtcagatccggggatggagggagccggagaagaggagtgagaaggccggggaggcaggccctgctgtcttcctgcaggccggcagcctgctggcagtggaggaccaggccgtccaggaaaggaaggggtcaggaggtcgggcagggcctcagcaggttcagacaagtccccagaagggagctgcaggcgccctcgagtccaggccccaagcctggctccggttgtccaaagagggcctaggccaggcctctggtgcggaaactgagtcacagccagacctcagggcacggcctagacgcttacgagccaaagttaggggtagagagcagagacctccggggggtctcagggagtagggggcttcagggcctcccagtctagagccggattggcgagttagacgcttgtagatccaaggttggattggggtggggtctctgggacgttggatcgctacgcaaggattggggggattcaagtgcttagagatcgaagtctgccctgggtagggggagtcagacaattggaaagcctaggtagttatttggggaggggtctctacgccttggcgaagcgcacagctgcatctttttggcttgaggcctgaggccttgtcgagaagcttccgtgaaagggtgggccagccgggccacgagaaagaaagtgaataaatcaggaatataagtgggcggggggcccctgagaggggggtcgcaaagggtgagacatggccaccaggcgtttaaccgacgctttcttgttgttgcggaataattccatccaaaaccggcagctgttagccgagcaagtgagtagtcacatcacctccagccctctgcattcacgtagcattgctgcggagctggacgagcttgctgatgaccgtatggcactggtgtcaggcatcagcttagatccagaagcagcgattggtgtgacaaaacggccacctcctaagtgggtggatggagtggatgaaattcagtatgatgttggccggattaagcagaagatgaaagaattggccagccttcatgacaagcatttaaacagacccaccctggatgacagcagcgaagaggaacatgccattgagataactacccaagagatcactcagctcttccacaggtgccagcgtgccgtgcaggccctgccgagccgggcccgggcctgctccgagcaggaggggcggctgcttgggaacgtggtggcctcgctggcgcaggccctgcaggaactctccaccagcttccggcacgcacagtcaggctacctcaaacgcatgaagaatcgagaggaaagatcccagcattttttcgacacatcagtaccactaatggatgatggagacgataacactctttaccatcggggttttacagaggaccagttagttctggtggagcagaacacactgatggtggaagagcgggaacgagagattcgccagattgtacagtccatttctgacctgaatgaaatattcagggacttaggggcgatgattgtagaacagggtacagtccttgacagaattgactataacgttgaacagtcctgtatcaaaactgaagatggtttgaaacagcttcacaaggcagaacagtatcaaaagaagaatcggaagatgcttgtgattttaatattatttgtcatcatcattgtgctcattgttgtcctcgttggcgtgaagtctcgataagtggcattgggttttcgtgtgtgccgcgcgtgtggatctcccgggtgtgaggggcttggcctgcgccccgccagctgcccgcagaggtgcagcctcgaggaatctgagggcgtcggggcagcgaacctttgcatccacggactcctccttccctagtcctgctcaagcggtccggggaatgggtttttgtttttccttcattgttgagaatttaaggacctttgatactgctgcacaatagagattgagttctgggatcagttataatatatattttttttagaaagagaaaatgagctgagagtttacaggcactgcagaagctgttcagtattatatgtgtatatgctatttttttagcagccatgtctgagcagaatgttaacataatttttggaaaaattttctttaaaccatctggtttttaagaaatttggtaccaaaaattgatgagtagaggcaaaaatgccccttcatctttctctatatattttccagttgaaaacaaactaagaagtcctttaagaatttataatccgttccccattaacttaatttagcttttccatcactgttaatgatcagagtaacaaagtgtgaaaaataagaaaccatcattgatgttaattaacacatttagatgggccagttaaaacagcttcataagttttaaattaattgtaaatggaatattcctcatttaaaatttttgcactgcattttctactgtaaaccaaaagaggttactaagcaaaaccacctaaatttaagttggtgatttaaatgaatctcacattaaaagaaagcttgacagtgttatgaaagccaccagactcagccagtgtgtccccatgggtatccccagccatccttgctcaatccattacttatatactaactacataatgacctgttcaaaccagactctatttaatgaactgtgaatttacacagaggccattttaaatgggtcaccccatttaggattagtggatctcaaattattaaccaaacatcactccatttcaaagtaaaatattccaccagcgatttgatttattggctcttccattgccactgagcaatgcccaggaagcaggcacattgccaaggactgggggcatcttgactaggaagctcctcgtttgtgtgagcgtgggtcagaccgccaaagtaggacttcatcgtttacctacctattatcaatatggtgcttgaatatattcctataactgtagaacagtgtggaaagtgatggtaactttgaagttgttcatgttttattggctttgttttaattgacactagtagagttttaatggtctttgtgtaaattttaatggcttttccattgtttttgcttctcttaaaaagtttaagaagaatatgacctcattaaatgtgctgttttatttggaccagtcacacaaaatgtctctctagagttgactttaaagttgtttacagaaatttaaactcaattccagagattgaagttgtccaaacagctcatgggcttagtgtccaaacccctgcccagccttccctttccaagttggtgccacctccaggtagccattggtggttttcctattactgatgtggctgtggaatgataaggtcctagaggggccctggcatttcaggaagcggacctggtattccctgacaaacattgcttaggaaagagggccggagaataagaagccagcacctcatcagtcagccctgcaatgtgagacttccgtagctgttgagagtcactgcaggtgttctttcatcccatctgattttaacccatggttgagacgttccaagttagatctgctgctcttaggtgtggggctgtccacattagggaacttgcctcaaaaacagtccacagtggcaataccggacttctgttcaagctttttaaagtgctgagccttacaaacccctgaaggaaggtgaccctttaagagaggatcatctttttttatatttattttcaccaaatagggtgatgagggttggtttttgttccctcaacccatttgggtaaaataacggatctgattagaaactgttttaaggaggggctgggctcggtggctcacgcctgtaatcccagactttgagaggccaaggcggtcacgaggtcaggagttcgagaccagcctagccaacatggtgaaaccccgtctctacaaaaaatacaaaaattagccgggtgggacacgcctgtaatcccagctactcaagaggctgaggcaggagaatagcttgaacccgggaggcagaggttgcagtgagccgagatcacaccactgcactccagcctgggtgacagagcgaggctccgtctcaaaaaaaaaaaaaaaaaattgttttagcgctgggtttcccaaggtgggagagacagacccagcctggagctggcccctggcctgtgtgctgacttcttggggtcctcaaaccactgtatttttctgttgagcctgtacttggggagagatcagtagcatttgaggaagtaagagaaaagaatcatggtacctcagggtttctttccctttactcgctggcagccattgtctgtgggcacctcatgtttttccacactctactgggccgtggaggtaacgatcacccaggccagtctcctctgcctgggatgcgccctctgagaggaggcctagcagggcaggctccctctgggcatccctggatgcagcctctggacacatgcctcctttaaagtgtccgggtgcagctcaggttgagtggaggtagaaggagaaacagacatgtttaccacgcgttttccaaagctcctgatctttcccaagattgtaactgaaaactgctgtctcttgttttgttcgttttgggggtggtggtgctggctgggccatgcttgtgaagtgatgtgtgtctctgatttaacggattcactgttttctctgctaattgagagagcgttatttacattatttatttgttttgacacaagtgctttcagtgttttatcctagctaatggcttcttaaaggtaataaaacccttccaacgtaattggtcagataaaactttttttcttgtatgcttaaataaagcaattagtgaagcacttctatccaaaatgacttttttgtccttttttaaaaccaatttactgttactggaaactttttgtacaataaagcaatcacgcagattaaagaacatcctgcaatcctagtattaattttaaaa

SEQ ID NO: 50 - DNA, 2739 bp, Homo sapiens
agtaagttccagcgcagctagaccgcggggtagtcggcgcgaggcggagcttggcagttccgtccacttcagccgcagcgtccctcgccgggtgtctcgccgcagcctccggagaggaacagaccctcactctctctgtcagaaaaatgtctgctccagctcagccacctgctgaagggacagaagggactgccccaggtgggggtccccctggccctcctcctaacatgaccagtaacagacgactacagcaaacccaggcacaagtggaggaggtggtggacatcatacgtgtgaacgtggacaaggtcctggagagggaccagaagctgtcagagctggatgaccgagctgatgccttgcaggcaggagcatcacaatttgagagcagtgctgccaagctaaagaggaagtattggtggaaaaactgcaagatgatgatcatgctgggagccatctgtgccatcatcgtggtagttattgtaatctacttttttacttgagaatgtaccaccccttccctgttgtccattgccatccacattcatgtcctctgccctctgtttgctctctcaacacacttccccacccaccgtcctccattccagcccaggcttctccatcacccattcctcctttttcgttgcgttcatttgcactctgtccctcaacactagaaatgctgctcgtggcacaatctaagtcattacccgaagagcaacagctggcgcctcctccctgcctgctttttctgtactctcaagttcccccaaagccccaaagagttggaggccaagggaaggggcagggaggggagtggctgaggcgaagtacccatgaagctgcccagacttgggaggagaagagtatcggtgcccatggtgacttctagaaaacctggccactggtaggagctagggaggggctgggaagatggcagctcactcagtactgcctggtcatgtggagctttccttcctggaccaggcctggagagggtcctgggggtggaccaaagtccaacttggtttcagtgcagtacccttttcgaaagtaaaaacttgttttttgtagttatttctaatctgttcgtccaggattttccgtgtctttggggatcttacaactttactttgttctccagaggcctggagaacacttagggattgtgaaaatagcaggacttgtttccatcctagaagcagtcccatgtgcttctagctggaaggagctttctcttctttacattttctacagcattctgtatgagggcaccaaataaatccatctagctggtagttttatctagccaaataatttaacctagctcccagttaattgttggcataaagagagagattgcctgttagttatagagaaacagtgagtcaagtgcttaatttgaaagtaacaagctcagaggaagccactccttgccctcgttaaagagggtcctgttcctctcttcctgttgatgaaggagcgtgagggtgttagcagtgtgagatctttggacacccatggaatcctttcctccacaccacccgtgcacttgccaaagacagggatgaggcaagtggttcttcctggggcccggccgatcctcaggatgcagagaagtcatgtagacccaccagccccaccttggggggaggcgtgccagcctgtgtcaggtgtgcttgtgtattgctgtgctgtcatggggccctctccttgagagccgcctctctgttcttcctgtagtatattcccctttgaaccaccctttcctgtctgaattctactttgcctcctttctcttcctcctctttgcatggtttgtgtgtatagacagtggaacctgaggatgggatctgctcagcctatcttcggggcaattgctgagcttcaggatgggctattaatgtgggataagcccaggtgcaaggggaggagggcaggctgggaacagagcggagaatgcccatggccctttattccttcttccctcggtccacgaacaggaagaggctgaggccatgctgggcagggtctggatgcccactttccatgcagcagcatttcattgctcaaaaccatccttcctttcctttcgcccttgtttcccacattcccttcgtcctgcccaagggcgggactgaagagctggaagaaagcagtcagtaccctcccaacggcccccctcgaaggtctccactctcctctgggctcctccttgcctaatgcagggggtcaccgctggagaagaaccaccactgtcctcgatgtgtcccaagcctggagcgaatccgtcctcttggctctcccagccctatcacaggaatcattcctgggtttctgtccctctgaggctcaccaggtgtagttggccttgttctttgggggtattagcccttctactttctttctcacccaccctgtaccctcttctgtgtgtctctgctatccccctttcctcccaccacccatgtgcatgagcaaatgtgcaacaaaaccctgggactttgcagtcaaatgaagctgagcttcccacatcccgttcttcggtttgccatgagacgatgtggggtttccactgtgtgtctgtcatcacctctttgtctttttttcctaaccctgatctcatacttgtatagagtaataacaacagttgtacttccaccaaaggcatgtggcatatttaccaatgtcatgtattctgaacaaaggcaaaaaatacaaattcctaccattaaaaaa

SEQ ID NO: 51 - DNA, 2160 bp, Homo sapiens
agtccttcagcggccgggttcgcgccgcggtcgccggctgcttacgtgggcgggcctagtgtggggctgagggtgcgggtcgctatggcggtggacatcacgctgctattccgggccagcgtcaagaccgtgaagacgcggaacaaggcgctgggagtggcggtgggcggcggggtcgatggcagccgggacgagctgttccgccggagcccccggcccaagggcgacttctccagccgggcccgcgaagtgatttctcacattggcaaactgagagattttcttctggaacacaggaaagattatattaatgcttatagccataccatgtctgaatatgggaggatgacagacacagaacgagaccagatagaccaggatgcccagatattcatgaggacctgttcagaagcaattcagcaactacgaacagaagctcacaaggagatacattcccagcaagtgaaggagcacaggaccgctgttttggatttcattgaagattacttgaaaagagtatgtaaactttactcagaacagagagccatccgagttaaaagagtggtggataagaaaagattatctaagctggaaccagaaccaaatacaaagacaagagaatccacatcttctgagaaagtttcacagagtccttcaaaagactctgaagaaaaccctgccactgaagaacgtccagaaaaaattttggctgaaacacaacctgaattgggaacgtggggagatggcaaaggcgaagatgagttatccccagaagaaatacaaatgtttgaacaggaaaatcagcgactaattggtgaaatgaacagcttgtttgatgaagtgaggcaaatcgaagggagagtggttgagatttccagactccaagagatattcacggaaaaggttttgcaacaggaagctgagattgacagcattcaccagttagttgtgggggcaactgaaaatatcaaggaaggcaacgaagacataagagaggccattaaaaacaacgctggcttccgcgtgtggatcctcttcttcctcgtgatgtgctccttctccttgctcttcctcgactggtacgacagctagccagggccacgggggcccagcacgagagtcctcatgggcactcacagactgcgtgctttcatgtacttccagtgctggagcatggtatgaccagattttatcacagtgccatttgaagggaaaggagttcagacagacagacgtattccccaaaaagggataccccaggccgatggtgttcagccatttagcagctgaaaaaggaaacagtgcacaccaatgggaggcagcctgcgtagccctcatcaggcaagacagactgaatgcaggagtgggtgattagctgctccttgaacttgaggctgccttggcagcaggggcacagcaggcctcaagagcccctaattgtctcagggttcaaaggaagacactgacctttcccatcccggtagcttcagggaagatcatagttaataacgtctctcaacaaatgattacttctttgtttccttgtggcttcttgtctgtctgagtcaacgaatacacagacttactggattatagaagagaaaattcacatctgccttgttaatctaataaatataattacagccccttaatgtgttgtcaatgagtctaagttgacaaattcagtggcagcccagccacctcctatcaatcaatcagggaagaaatgcaggggagactggggccctcagtgaggggctgcctggcattactcctccaaagactgctgcccccagaacaggcagggggtgtgggagggccagtttcccgccactgggtccaaggagcctttgttcaaaggaagaagtgggccacggaagaacgggcctgcttctctcgtgcctgtgcttctgacctccaggaactgtaaacaggaacacctatgtgtaactgaaggcatgagacatctgtacaggaagcatcccagcgcccacatgggcatgagacagtctgcactgcgcctggtgaaatgcgtgtgtgtacagacagtccactgggcagcacaggtatcctcatgttctttatttgcacagagtgaaatgtcagaagttacatgtaaatgaattcacagtcaataaagtccacgtctacctggaaaaa

SEQ ID NO: 52 - DNA, 3330 bp, Homo sapiens
gcagagcgcgcggggcgcggttgccgtggcagcgccggctccagggagggctgctggcgccgggccgggaccgcggggcctgaggcggagaccggagagcccgaggcccggccggaggcagctcgggacaggcttgagcggcggggcgcgctgcccggccggcggggatgcgggaccggctgccagacctgacggcgtgtaggaagaatgatgatggagacacagttgttgtggttgagaaagatcatttcatggatgatttcttccatcaggtggaggagattagaaacagtattgataaaataactcaatatgttgaagaagtaaagaaaaaccacagcatcattctttctgcaccaaacccggaaggaaaaataaaagaagagcttgaagatctgaacaaagaaatcaagaaaactgcgaataaaattcgagccaagttaaaggctattgaacaaagttttgatcaggatgagagtgggaaccggacttcagtggatcttcggatacgaagaacccagcattcggtgctgtctcggaagtttgtggaagccatggcggagtacaatgaggcacagactctgtttcgggagcggagcaaaggccgcatccagcgccagctggagataactgggagaaccaccacagacgacgagctagaagagatgctggagagcgggaagccatccatcttcacttccgacattatatcagattcacaaattactagacaagctctcaatgaaatcgagtcacgtcacaaggacatcatgaagctggagaccagcatccgagagttgcatgagatgttcatggacatggctatgtttgtggagactcagggtgaaatgatcaacaacatagaaagaaatgttatgaatgccacagactatgtagaacacgctaaagaagaaacaaaaaaagctatcaaatatcagagcaaggcaagaaggaaattgatgttcattattatttgtgtaattgttttgcttgtgatccttggaattatcctagcaacaacattgtcctagcaaccatatcccaagagccatttatccttgagactcagaccacatctgcaaccaaatcagcatcctgtcatttcgtgaatgaatctcagacgctgtaacccggcatcgagtgctgaccttgtaatgtatgagttcacggaagaagcacaaccgaacgtcttgttcagtgacagcgccgtaagcacagtgggtgtgatgcgtgaccctgaatgacacactacagaatgtgagcagtgtgagacttctctcactggccttgaaataagaaaatattgaacattttaatattaaaaatatttcagtgttaacaaatgtgcatgaagtttaattaggaaggaatgctttatgttatgaaggcttttttttttttttttgagacggagtctcgctttgtcatccaggctggagtgcagtggtgcgatctcagctcactgcaacctcggcctcccgggttcaagcaattctcctgcctcagcctcccgagtagctgggattacaggcatgggccaccacacccagctaattttttgtgttttctttttagtagagacggggttttaccatgctggccaggctggcctcaaactcctgaccttgtgatccacccacctcagcctcccaaagtgctgggattacaggcgtgagtcaccgggcaggctgttctgaagcttttagatctcaggtctaaggcttcctttccctccctctcccagctagtttgtgctaattaagagaccttttatactgttttattgcctgtttgaagaaataatttttatcacgtttttgtaagatatctataattttaaatgtttataaattgtttaatttattagcatcttaatgtaccccatttttatatactgaatgtggccttttgagtgaaataggaagcttcatggtgttggagccacctttgtacagttgtttaaagtttcccattgtcacggaaaacattggctgcaaagcccctcaaagccctcaagtgccttctgtgagtttaaatgtgctggtgccctccagaaaagcctcggcctcagctccgtttccgcctgttccctcccccaggataatgaatggttactgcactgtaaagaccgtggtctcttttcactaaataggagattcgagtttcccagtttacatgaatgaagtctgaatttaagacggtgatgaaactgaggttcagtactctcgggactcgaggaaattattcctgagacatggagtaattcttacaaatttaaactattgtacagatccacatacatgttgttaagtacctaatgttttgctgaacttttaaaagttaatttccaaaatgtatagggattcatgataattaaacctttttattgctcatttttttagtagaagaatatcacttatttttagacttgtaaaatgtatgaactggtgagcggacatctgttaagagagtcactagtcagaatgttaaaggagtgcatgcaggatgccccaaatgtcgtgaactcttgttactcctgtatgtagtagtgtaagcatgtgacttttaacaccatttggtttgaaactaatgtagagatgcctgattccaaacaggtgtggagaatattgaatggctcagaagccgcgtcccttacttaacacaattccgaatctccctcatccatgatgcgtccattggatcactcgctggtggtcactgtgtggcagttactaggggaattctgcctctgactgttctttttcttttggtctttaaacaccctgtcgtgggatgtgctcactgatttgtggctatgttgaaggtatcacttgtcttgagggttttcaatatttcaggatcatgctggtggcaaaaggactccacgcctctgtggaatcatgtccacagggggacctgcctcccgtgatgtcccacctttccttcaaggtctgtcatatgagtcctccccttttacaacacttattatggtatttttcaagttattcttcttagatttgcagtacctactgaaatttgtgtttttatagttgaagttaggaaaatgctatttgatttgtatttagatatttaagtcacttgtccaatgatgtgtatgtctaagcctcatgtaccgatttgaagtcagacttaaaaatgtatttacagattcacttgagactttttaatcggttcttcaaatatttcatgtttacattaaaaatttccagagaagcataaaagtattcactttcctgccttgtcatttctggaaagattttggggagatattttattgcatattaattaataaattgttctactaggaaa

SEQ ID NO: 53 - DNA, 2940 bp, Homo sapiens
gcgcggcggaggctcccgtggcctcggacgctcctcctagctagcggccgccgcccgccgccgcctgcgcctccagctccttcgccccggcgggcccggccgccgcttccggcagctcacctgggaagcgctcacctgggacgcgctcacctgggacgcgctacctgcctccgggcgcctgggcttcaggatgaaggaccgtctggagcagctgaaggccaagcagctgacacaggatgatgatactgatgcggttgagattgctatcgacaacacggcttttatggacgagttcttttctgagattgaggaaactcggcttaacattgacaagatctcagaacatgtagaggaggctaagaaactctacagtatcattctctctgcaccgattccagagccaaaaaccaaggatgacctagagcagctcacgactgagattaagaaaagggccaacaacgtccggaacaaactgaagagcatggagaagcatattgaagaagatgaggtcaggtcatcggcagaccttcggattcggaaatcccagcactctgtcctttctcggaagtttgtggaggtgatgaccaaatacaatgaagctcaagtggacttccgagaacgcagcaaagggcgaatccagcggcagctcgaaattactggcaaaaagacaaccgatgaggagctggaggagatgttggagagtggcaacccggccatcttcacttctgggatcattgactcacagatttccaagcaagccctcagtgagattgagggacgacacaaggacattgtgaggctggagagcagcatcaaggagcttcacgacatgtttatggacatcgccatgctggtggagaatcagggtgagatgttagataacatagagttgaatgtcatgcacacagtggaccacgtggagaaggcacgagatgaaacgaaaaaagctgtgaaataccagagtcaggcccggaagaaattgataattatcattgtgctagtagttgtgttgctgggcattttagcattgattattggactttccgttgggctgaattaagagtggcctaagaggctgctgcactgaaataaactgatttcactccagactggtgtggccacccttgtcttcagatgagaatggagtctgaatggccttcctgagagcgagtgcgacccgttcctttgtttccttgcaaccacccttggacctgactcagctaacaatctagccctgggggaatgtgatctacctgatgcgaccctgagttctccccagagcctcctcctgccccaccagctctcaagtaccttttctcctggactgtgtggacccacccagctttcttcctccctgttgtgtgtcagattatgccttgcacttgggaaagctcttgtgagactctcccaaggtgctgtatttttctacctcatggagtattctcccagaaactgcaatgtatttttttaggggagtatctttaacaaagcagaatgattcttctaagtttggcaacaagaaggcttggatctgagtcttctacctggcaggatgccaatcctgtttgttgtccgtatgtcctgaaaacatgagggactggcagatgtcattttggtctaaagagctgacttgtttgaaattcagccttaaattaagctcttagttgttcagcttggggggcaactttgatttttctctgtgttgtagtctctcatatttactcaaggagggaccaggatgatacagtcatctgaggttatgctttgcaaaaggctgacggtatggaatatgtttccatgtctgagtcttagaaactggctgctcattgttagaaagtgatgctttgtgagactattgtcttggggccaaaaataatcagggattttaaattgggcaagggacaaggtgctagaatcctaagctctggaaatatttcatgacactggtgtattcactcatgtgttccagatgtattctaattgtgtatgaaatgtatgtacacataagtgtgtgtgtctcaggaagtaggaaataaaaatggaagctattatgacctcaaaaaaaaaaagccaactttgagctaggataaaaattgggtaaaggacatttgcttacctgcaaatgaatcactgtggaaatgtgatcttcccatatcatcaagaaacttgttttctggatgaatactgggagaataaaatgagaactctggagtgagctaaattgatcccaattaagtttttctgcttagcagacagaaggtataattttttgacaccctttcccacctggtgcctatgctaggcttgtcctgagaacatccctcagtaacttgatattcacatgacctacaggatgtcccatctgcagggctgagtcagttggggaacaccagaggctacacagtagctcttcctgctactcggttaatgagcttggcaggttctttgtctcactgaattcttatcatggaaacagcagcagcagccgctaggaaatcttcaagtgtagtgtctgtgctaacccagtggtaaatcccttagatcccctgctggtctctggcagtctccttgattttgggtaccatgtatattttccgctttgactttaacgctttctaggatagggtaagcacccttaattcaggcactgtccattagcttcctttgcaaaggctacttatggccggtcacaatccagcactcagacagagccaaggcaatatcctcttgcccatggctatgatgtcagacagtggatgggctccagcaacaagagacaaaataactaaaggcctttgctctcctctgacattgaggcctggggcttacagtttggaatacaacatgtgaaggtttttgttgttgtttgtattttttagatgtaaacttgattattttattgctaatttaaaaataaaaatgactttgtattgattgtga

SEQ ID NO: 54 - DNA, 4820 bp, Homo sapiens
agcggaccgccgcggcccgcgctgtaaccgcggctgccgctgctgctccgggcgggcgttggtgccgtgtgccgaggcgccctgtcaggcgatggggagcggctgggcggggagagccgacggccgcggcggcgcctgaggaacgcagccgggctcgggagcggcgagggcgggccggtccagcggcggaggagcgaggcggggcgaggcaggcggcgcggggacccgcgccaagcagcggcggcctcggaggaagaggggtcgccgcccaggtttcttgcggccgccgctcttgtcgtcgcagtatttcctgttcggattatcttttgcttccccccagctgcctccttaccctcacactcccactcctccgtttccgcggtcgaagctgccttcggccccgggtggtctcccccgcccggggaccccctgtgcctcccctcccgggctgcgggggagcccctccgagaccatgaggaaattcaacatcaggaaggtgctggacggcctgaccgccggctcgtcctcggcgtcgcagcagcaacagcagcagcatccgcctgggaaccgggagccggagatccaggaaacgctccagtccgagcactttcagctctgcaagactgttcgccatggatttccctatcaaccctcagccctggcctttgatcctgtacagaagatcctggcagtgggaactcagactggtgctttaaggctctttggtcgtccaggagtagaatgttattgccagcatgacagtggagctgcagtaatccagctccagttcctgattaatgagggagcgcttgtgagtgccttggctgatgacaccttacacttatggaatttacgtcagaagaggcctgccatactacattcgcttaaattttgcagagaaagggttacattttgccatctgcctttccagagtaagtggctctatgtgggcactgaacgaggtaatatacatattgtcaatgtggagtccttcacactctcaggctacgtcattatgtggaataaagccattgaactgtcatctaaatctcacccaggacctgtggtccatataagtgataatccaatggacgagggaaagcttttgattggctttgaatctggaacagtagttttatgggacctcaaatcaaagaaagccgactacagatacacatatgatgaggctatccactctgttgcttggcatcatgaaggaaaacaatttatttgcagtcattcagatggcaccttgactatatggaatgtaaggtcccctgctaaaccagtacagacaatcactccacatggaaaacagttaaaggatgggaagaagccagaaccatgcaaacctatcctcaaggtggaattcaaaacgactagatctggggagccttttattattttatcaggaggtttgtcatatgatactgtaggaagaagaccttgcttaacagtgatgcatgggaaaagcactgctgtgctagaaatggactattcaattgttgattttctaacgctgtgtgaaacaccatacccaaatgattttcaagaaccatatgctgtggttgttcttctagaaaaggatttagtacttatagaccttgcacaaaatggatatcctatatttgaaaatccctaccctttgagtatacatgagtcccctgttacatgttgcgaatattttgcggattgtcctgtggaccttattcctgcactttattctgttggagctagacagaaacgtcaaggttacagcaaaaaggaatggcccatcagcggaggtaattggggcttgggtgctcaaagttacccagaaataattattacagggcatgctgatgggtcagttaagttctgggatgcttctgcaataactctacaagtattatataagctaaagacatctaaagtatttgaaaagtcaagaaataaagatgacaggccaaacacagacattgtagatgaagatccatatgccattcagatcatctcctggtgtccagaaagtagaatgctgtgcatcgctggagtttcagctcatgtcattatttatagattcagcaagcaggaagtaatcacagaagtcattccgatgcttgaagttcgattattatatgagataaatgatgtggaaactccggagggtgagcagccaccacctttgccaacacccgtgggagggtccaaccctcagcccatccctcctcagtctcatccatctaccagtagcagttcatctgatgggcttcgtgataatgtaccttgtttaaaagttaaaaactcaccacttaaacagtctccaggttatcaaacagaactagttattcagttggtttgggtgggtggagaaccaccacaacaaataaccagcctggcagtcaattcttcctatggactggtggtttttggcaattgcaatggcattgctatggttgactacctccagaaagcagtgctgctcaacctgggcactattgaattatatggctctaatgatccttatcggagagaaccccgatctcctcgtaaatctcgacagccttcaggagccggtctgtgtgatattagtgaagggactgttgttccagaggatcgctgcaaatctccaacctctgcaaagatgtcaaggaagttaagcttacctactgacctaaagcctgatttagatgtaaaggataactcctttagccgatcacggagttcaagtgtaacaagcattgacaaagaatcccgagaagcgatctccgctcttcatttctgtgaaacgtttactcgaaagacggactcgtccccttccccttgtctgtgggttggaacaacgctaggaacagtgcttgtcattgcactgaaccttcccccagggggagagcaaagacttcttcagccagtaattgtgtctccaagtggtactatattgaggttaaaaggtgcaatcttgagaatggcatttctggataccacaggctgcttaataccacctgcgtatgaaccctggagagagcacaatgttcctgaagaaaaagacgaaaaggagaaattgaaaaaacggcggcctgtctcagtatccccctcctcttctcaggaaattagtgaaaaccagtatgcagtgatatgttctgaaaagcaagcaaaagtaatctcactgccaacccagaactgtgcttataagcaaaatattacagagacctcgtttgtgcttcgtggagatattgtagcattgagtaacagtatctgccttgcctgtttctgtgccaatggacatataatgacttttagtttgccaagtttaagacctctgttggatgtgtattacttgccccttaccaatatgcggatagccagaacgttctgctttaccaacaatggacaagcattataccttgtttcacctacagaaatccagagacttacttatagtcaagagacctgtgaaaatcttcaggaaatgttgggtgaactcttcactcctgtagaaacacctgaagcaccaaacaggggattctttaaaggcttatttggaggtggtgcacaatctcttgacagagaagaactatttggagaatcgtcctcaggaaaggcttcaaggagccttgcacagcatattcctggccctggtggcattgaaggcgtaaaaggggcagcatctggagttgttggtgaattagcacgagccaggctggcactagatgaaagagggcagaaacttggcgatctggaagaaagaactgcggccatgttatcaagtgcagagtcattttctaaacatgctcatgagattatgttgaaatacaaagataagaagtggtaccagttctgacaaccagaatccaataagtccaacttcagccagaaggaaaaaagttttccatttttattacattctttaggaaagttaacgttaaagggatgttcgtcactgaatactgttctttcctagcacagtcatgcactgttttacctcagtcatgtggctttaactgaggagtgttcacacgcactcgaaatggagtatatggtgtgtgccagttatgagttgaccatttgggaattaaacaggtcacacgtgacagatgaagaaaccaagggggctgctgaggagacctggtgcagggactaatcctggatcattcctgtattaaactttcatatgccaaaagggtttgtgccgttttatctgccatcagtgtttgacctgtttagggcagaggcaataagtcagaagtcttgaagttgaaatagttatatgtgtgtcattggactggattataaacagctgtcttggactttccctctcttaacactgactggtcatcagtatcattagtgaaaaagaaacaaattgtttgttatcatctctttagacagataagctgaatggtgggctttaaataataaaaacatacacatagttgacttgtgtatgagctactcttggattcttgttattatagacttgtatttagttcatattttgtcaaaagcaaaacaagaagatacatcacttttcattgaaaagaaaagtgtagagcatgactgaattgctcatcattctgggagtttccatgtagtggctatgcagtgtggaaagtgagaaaaacctccattgtggtgaggagaatacttcaatgtcccttgtccttgttctcattaattcagctaaaggtggatttgaccaaaataatgctggttaaatttgtagaaatgttgaaattggctgtgttttaaattttgcttgaatttttataaaatgtttaaccaaatgtacctttgcattctttaattaaaattgcttaaaaaaaaactttcattatttcagt

SEQ ID NO: 55 - DNA, 2148 bp, Homo sapiens
cgcgactagggtgcagcgccaggtccggtgttggggtgtccgagttgccgccggagaggagtggcctcgcccgcttgagttttgattcatcatggataatctgtcatcagaagaaattcaacagagagctcaccagattactgatgagtctctggaaagtacgaggagaatcctgggtttagccattgagtctcaggatgcaggaatcaagaccatcactatgctggatgaacaaaaggaacaactaaaccgcatagaagaaggcttggaccaaataaataaggacatgagagagacagagaagactttaacagaactcaacaaatgctgtggcctttgtgtctgcccatgtaatagcataactaatgatgccagagaagatgaaatggaagagaacctgactcaagtgggcagtatcctgggaaatctaaaagacatggccctgaacataggcaatgagattgatgctcaaaatccacaaataaaacgaatcacagacaaggctgacaccaacagagatcgtattgatattgccaatgccagagcaaagaaactcattgacagctaaagctactgctgttcttctttatcatttattcacttccgtagctcctccttgaaagttattaccttttcagagtttaagttttcggttccacgctcttctaattgggagataatatggaagaagggccagagcagttacagccctccttcttttttgttttctgttgagggccgactgctgctctgccttccttctagtattttctttctcaattcatacgcttagattggttttcatatgtcatgtttagtgttttcatcctcctcatatacttcagcaggttcttttgctttcaagatttggaagcattgccaaagacagccatgaagaaggaagctgtagaggtgttttttgttgttgtttatttttgcttttgtggttgagggaaggacaagagataagaggttgttacctcagtaaaaaccttcaggccacaaagcaaaaagttgcatagccacaacgaagatctagttggatatagtttttgatttaagttgcagttatagccaatttaggctaatgcttggttttggagcttttatacacaacgtttttgttaggcatcacagttttgcaacctctgctccaaagagaaaaatagaatgagttttctttcttttttttttttttggagtcagagtctcgctctcttgtccaggctggagtgcaatagcgcgatctgggctcactgcaacctccgcctccctggttcaagcaattctcctgccttgcctcctgagtagctgggattacaggcgtgtgtcaccacgctcggctaatttttgtatttttagtagagacagggtttcaccatgtcaagctggtcttggactcctgacgtcgtgatccacccgccttggcctcccaaagtactgggattacaggcgtgagccactgtgcctggctgagttttcttaaagtgagcttaatttctgaactcttagtgattcatatatgtacataaatctgtgatcccatttcttattgcaccattcaggaacactttatataaatgagtggctttttatttcatattattagtagtatcatggttccattacaggcctattaacatcatacattgtcattagtctttgaagaaaaaatatgtaaatatatatgtgtaacatgagaatttctctctaaagcagggcttaaaattttttggaaaagtttgacaaagcataccacatgaattcagatttacctcaatgctaagaattatgtttagttaggaaaaaggaaagtcattttgacctcaggtagaaaaatagattgctttgagttttatgtagctttagactttaaaaagttagaatttattctgtaactaaaaattatttgaaaaaattatgcctctggtttaattattggtgattacacactctttctcttacccttgtgtattgaactatgtccataatcaagttgatgtggatcctgaaaagtgttatgaacatctgattggtatttgtcacatttattttaaaattagcatctgaacacttcaaagctgtcagtgtgtattggtttcaccaataaccactgcttgatccttacaattaaattttttaactaac

SEQ ID NO: 56 - DNA, 750 bp, Homo sapiens
atgtctctcgaagaccccttttttgtagtccgaggcgaggtgcagaaggcggtgaacacggcccgcgggctgtaccagcgctggtgcgagctcctgcaggaaagcgcggcggtcggacgcgaggagctggactggacgaccaatgagctgcggaatggcctgcgcagcatcgagtgggacctcgaggacctggaagagaccatcggtatagtggaagccaacccaggcaagttcaagctcccagccggggacctgcaggagagaaaggtgttcgtggagcggatgcgagaggcagtccaggaaatgaaggaccatatggtcagcccaacagccgtagcatttttggagaggaataacagagagatactcgcaggcaagccagctgcccagaagtcacccagcgacctgctggatgccagcgcagtctcggccacatctcgctacatcgaggagcagcaggccacacagcagctgatcatggatgaacaggatcaacagctggagatggtgtctgggagcatccaggttctgaagcacatgtccggccgcgttggagaagagctggacgagcagggcatcatgctggatgccttcgcccaagagatggaccacacccagtcccgcatggacggggtcctcaggaagttggccaaagtatcccacatgacgagtgaccgccgacagtggtgtgccatcgccgtgctagtgggggtgcttctcctcgttctcatcttactattctctctctga

SEQ ID NO: 57 - DNA, 1794 bp, Homo sapiens
gggggtggggttacgtgtaggtgacgtggccgcttccagtctttggtcgggtttcggcggcttcagtgctcggggaggaggcagtgacggccggtgagattggaagtggcggcggcggcaggcggcagaggggagtccgaggttatgcgtctcaatgatcccgcggaaacgctacgggtctaagaacacggatcagggtgtctacctgggtctctcaaagacacaggtcctgtcccctgcaactgctggcagtagcagcagcgacatcgcccctctgccccccccagtgaccctcgtccctccccctcccgacaccatgtcctgccgggatcggacccaggagtttctgtctgcctgcaagtcgctgcagacccgtcagaatggaatccagacaaataagccagctttgcgtgctgtccgacaacgcagtgaattcaccctcatggccaagcgcattgggaaagaccttagcaacacatttgccaagctggagaagctgacaatcttggcaaagcgcaagtccctctttgatgataaagcagtggaaattgaagagctaacatatatcatcaaacaggacatcaatagcctcaacaaacaaattgctcagctccaggatttcgtgagagccaagggcagccagagtggccggcacctgcagacccactccaacaccattgtggtctccttgcagtcgaaactggcttctatgtccaatgacttcaaatcggttttagaagtgaggacagagaacctgaagcagcagaggagccggagagagcagttctcccgggcacctgtgtcagccctgccccttgcccctaaccacctgggcggtggtgctgtggttctgggggcagagtcccatgcctccaaggatgtcgccatcgacatgatggactctcggaccagccagcagctgcagctcattgacgagcaggattcctacatccagagtcgggcagacaccatgcagaacattgagtcgacaattgttgagttgggctccatctttcagcagttggcacacatggttaaggaacaggaggaaaccattcagaggatcgacgagaacgtgctaggagcccagctggacgttgaggccgcccattcagagatcctcaagtacttccagtctgtcacctccaaccggtggctcatggtcaaaatcttcctcatcctcattgtcttcttcatcatctttgtggtcttccttgcttgaaccctctctactctgaggcactctgttggggtttgggaccctcctgggaaggcaagtggccagtgctgccactgagcctgtgcagggtacttgggagaaaggccctgtttccctggaactgctaagaatgaccactgcccctgatcccccaccccttgcctctggccaccctgtcctccccccaccaccctcaggcctatgaaacacacagggttctagatttgaactctgctgtgaagtgactggaagggagcagaggccagctgggggccagtgggggaggttgtttccactaggagatttttataaaccctctccagcctctcccaaaggaagcgttggcagcaaagggagatgatgcccttacccaccttcctgtgagtgaagagaggaagcagccccagggaccaattttcccaattgacctctttcttcctctttcaccatgtgaggcagggagccctgagcccttcagctgcctgcacaacccctgacattggctgctggtgactcaatctgccaaatgtgctgcagctcgttttctcccaattacagcaagactgtcagcctca

SEQ ID NO: 58 - DNA, 4604 bp, Homo sapiens
gggaggtgggactgactgagtcttccgtgtgtcgccgccgttgccgcctcagcttcagcctcgttactcctgcggttctgtgactgtgctgctggcgttaacggcgcgaggtgaagggaggtgacggagtgtgcccgcgcgcgcgggggtcccctcagtcccagcagttcccttcgtgcgcggggggcggcgagggtcttcagcagtcgggagaggcccttgacggcgccatgtcggcgggcggtccatgcccagcagcagccggagggggcccagggggcgcctcctgctccgtgggggcccctggcggggtatccatgttccggtggctggaggtgctggagaaggagttcgacaaagcttttgtggatgtggatctgctcctgggagagatcgatccagaccaagcggacatcacttatgaggggcgacagaagatgaccagcctgagctcctgctttgcacagctttgccacaaagcccagtctgtgtctcaaatcaaccacaagctggaggcacagttggtggatctgaaatctgaactgacagaaacccaagcagagaaagttgttttggagaaagaagtacatgatcagcttttacagctgcactctattcagctgcagcttcatgctaaaactggtcaaagtgctgactctggtaccattaaggcaaaattgtctggcccctctgtggaggagctggaaagagagcttgaggcaaacaaaaaagaaaaaatgaaagaagcacaacttgaagctgaagtgaaattgttgagaaaagagaatgaagcccttcgtagacatatagctgttctccaggctgaagtatatggggcgagactagctgccaagtacttggataaggaactggcaggaagggtccaacagatacaattgctaggacgagatatgaagggacctgctcatgataagctttggaaccaattagaagctgaaatacatttgcatcgtcacaaaactgtgatccgagcctgcagaggacgtaatgacttgaaacgaccaatgcaagcaccaccaggccatgatcaagattccctaaagaaaagccaaggtgttggtccaattagaaaagttctcctccttaaggaagatcatgaaggccttggcatttcaattacaggtgggaaagaacatggtgttccaatcctcatctctgagatccatccggggcaacctgctgatagatgcggagggctgcacgttggggatgctattttggcagtcaacggagttaacctaagggacacaaagcataaagaagctgtaactattctttctcagcagagaggagagattgaatttgaagtagtttatgtggctcctgaagtggattctgatgatgaaaacgtagagtatgaagatgagagtggacatcgttaccgtttgtaccttgatgagttagaaggaggtggtaaccctggtgctagttgcaaagacacaagtggggaaatcaaagtattacaaggatttaataagaaggcagtaactgacacacatgaaaatggagacctgggcactgcaagtgaaactccgctagatgacggtgcttcaaaattagatgatctgcacactctgtatcataaaaaatcttattaaattgaccatatctccagacaagattgttaatcagactattctgaatttggggcactggggaagatggtgacaaagactacaaaatcaggggaggctgtttgttgcctaaatgaaaggcgggtacctcagggcttcatgtgaacaattctcaatgcataaaacaccctgttttctgtggtagaccataattagctattgcatgtaaagcaattttgattttcttgaacttgtaagcaccaaagcatgtgtttcccaaaggggtattactgggctcttaagtaccaaatgaaaccctactgttttacttggttccttttccctttagtaggaggacagtgctaactggaattttataaggagtaccctttaaaatacagagagtaagtgaattcatattttatattctagaatgttaactgtggtatttcagaagacagagcttgactcaatgaattgtagaaatataggcttgacttaatttttgtaactgaaaggctttagacttaaaaaaatttattgtgcatcctaaaatctaaaccaattattaatgatcatttattgtaatgagtttgcatttcagctttattcaatgcagtacaaaatagttttctttaagcagtcttttatcaatcaatgctgcactagaaatagattctcaaaagttactaaacattttactttttttgttttttaaaagaaatgcagatgagtgtaaaacatctgttctcaattatgttgatctgtgtgcgcagtactggagcatttacccattcatgttgagcctcaaatgcttgttttctggggtccacaaaagacagttttatacattttgagttgttcataaagtttgtcttgtgatagtcctggcacttaaagacaaatttttctggtagtaaaagttcagatttattactatgtcatgaaacacagtacattcaaatcaaacggcagttttctttctaagtaaatgatttccagtcatctaaaaggtgggcaagatgagataaagacattttgatacagtaattgttttggttgggttttcatgtcagtttatgtttgactaaagctctcttcatatgcaggtttataaatttgttaggtctgttgtcccatgattaaacatggagtgcctcctctctgatttaatattctgcaggtcattgtaacctgctaggcaaagtcacaacattgcattaaagaggtgatagctttgctaatatcactgttttaaaggacgtacagttaaaggaatattaagtgggagaaagcctacaaggcttttagaatattatcagtatcttcatttctggtattcagatgttatgtgataaaacacattttttttggctttcccagatacactatatatttgttcaagggtaaatctataaaatgtatatactttattttgtggttttgctatttataaatttaatgttttaactgttgctcatttatggtttgttttgggtggtggtgttcatctgtatatcaccatgttaatttgtaatggaagtgcacttcgtagtgtatattgttactgacattaaaatactttatagcattgtctctgagcaaaagctagtatttaattgtacaaatgaataagcaagttacatgttattgtttgctcttgacagggtaggcctcttaaaagaaaaaaaacaacttgttttttctttatgaatcccctatgccaaacacataccttccatgcatgacatgagatctgcaaactggattttagccaccgtatttatttagtcaaaaaaattgtccattgtagcagacccgaaaacctttttgctgtgacatgaaaccatgttattcttatcttcttaaaacacagcctgggatggaatggccatggcatttttttcagagaacatcctttatctgctatgactgaatccttaggaaatgtaagctataaccctttgattttcaagaactaccgaataagtgtatgaagaggtggttttttaaaacttcaagttggaatttttatgaggtcactgtgtaatttgaagaattgtgtgagattgtcatgatataaattccttttaaggactgataaatagaatgaaaagtttccaggtagtttaaaactccacaggtcagtttccttttcattcctgcttcactgtggtttataagcctacgggagagcaccgttgctcagatgctactgtgagcttcctgtccggtgttagaaagtaactagttaaaagttcattttagaatgtatggtttttggggatgaactaagaattagttattagttccaaaggactgagaaccaattttaatattttcacatttataggaaagaaattcatatgtccctgaaacttctaggacaaaaccaaacaagtaaggagggaactgttgcaaagccatttcatcgagaaggggacagaaggagaaatacacacatgtatacacaaacagaatggttgagaaaacgttttaataaaatgtgagggttgtatgtgtgcgtgtatatatttacacttaacctctaaaattctcttctacagtatctctgttatgaatatgatggaaaagcaacattttggtggtgagactattgttaaaataaatttgagaaagacgaaaattttgtgagtcttgataattacaagtcaacagctatcgaaagttagcacagcttgtctgtggtgctgtttttttccccactgcagtggacttatgctgttttcatgtttagaaacaaaaaggtttcatgtgattcatgtgtaagatgcacagtatttgacatcctgattatgtaatccctattccatctatccagtcttacacttatggttggcctcaaatctattgcatttatgataatgtattatatctagttgagtttaatatttttttattagcctgtaaataaagatggcatcttctacattaaaatgatattgatctcatttttttaaataaacattttgtttccttgacgttaaa

SEQ ID NO: 59 - DNA, 3319 bp, Homo sapiens
aaccggaaggggggctgtgaggacgtgttccgaggaagccagagccggagccgtggcctgcggggccggcgacatggatcccctgttccagcaaacgcacaagcaggtccacgagatccagtcttgcatgggacgcctggagacggcagacaagcagtctgtgcacatagtagaaaacgaaatccaagcaagcatagaccagatattcagccgtctagaacgtctggagattttgtccagcaaggagccccctaacaaaaggcaaaatgccagacttcgggttgaccagttaaagtatgatgtccagcacctgcagactgcgctcagaaacttccagcatcggcgccatgcaagggagcagcaggagagacagcgagaagagcttctgtctcgaaccttcaccactaacgactctgacaccaccataccaatggacgaatcactgcagtttaactcctccctccagaaagttcacaacggcatggatgacctcattttagatgggcacaatattttagatggactgaggacccagagactgaccttgaaggggactcagaagaagatccttgacattgccaacatgctgggcttgtccaacacagtgatgcggctcatcgagaagcgggctttccaggacaagtactttatgataggtgggatgctgctgacctgtgtggtcatgttcctcgtggtgcagtacctgacatgagccagccacgctcagtggctgaacagcattcccacagcctgcaagtgtgtgtgtgtgtgaaagagagaggggggcccagaggccgccttttgaaatgtttgcctgtctgaactgtgaagacacttgggagtgattgtggtctaatttccaacctgctctgttttctgtgacatcttggagggggagctagtgccaccaccatgcgcggtgcttaggaaatgaaagaagtcccgggtctgtctctctcactctcgctctcactgggggagggaaagaatggctttggtggctttgttcacatagctgatgcgtgccctgggaaggtgtccacagtgagccctgtgtgcaggactgtccacacggttcacaccttgtcaccatcaggcctttctggctcctgatagggtggagcaaaagtggaaaggaaaggaaagaggccttttctcacagccattatattaaatagtaggtcgattcacatcctcgtgctcctggccaccctcccctgtgcctcagtgacatgtagatgactgactgccaatacttgtcaccattccctggaagcagctacctaggggaaacaagatgtagtgctattgccgataacaagtaagattttccacactacagctgggtgtttctcttttctaaagtgaggccagtgttatttcccgggagtgttcagtcttgaccctagtcactgattttttctagttgttaatagagtggttggcttttaaggttcagagactgtggcttggcacctgcgcccaggctttgtgggcctttgccccttagaaagtagctgtaggcaaagatttgtgattttccaattacagtctcagctctagttttagtatctctaattctttggttcccttctcttccctgaaatatattagcacctgccagccaggccctcattttgcccagccagtgtgggcagatcccaccgtggagacatctgtagtgtgtatgtccttgtaacactctgttttcagggactacaacctttttccttctgtgaccagccccggattcaggctgtactaataccaggtatattgtggaatttagtataaaggccaatctgtcctgaagtccatctaatgtggtgaatcactgaaagtctcagaaagacctggttagtgtatgttctcatttaccacaggcctaccagccctgggcacagcagcttcatggcaagacataaaatgacactcaaaatccttcagatctggaaaccggctcagtattaaccctacctttggttgtcctgccctacctgctctgttagtttcttgttgcttgaactgtcttctgtcttatttcccttcctttctgtgttcctcttcacctctcttgttcccctccccgctgctctgtagtcatgttggtcctttcaggcacctctgtggcatagctcccctttggtaagttttcttaattgtcatagattaactgagtttcctggatgctaatttcacactttcggttggaggagatctccattgttcctacccctccgggccaaatgggccccaggtttccaaggaaggagcaatctgtgactcctaaaatgggttggggccctgccagagttaaagcagtgactggagggtggactggggggttgcagcatctttagacctagatctgtctaactctggggaggcacattgacatttccattacacacagcactgctgcggtgccagggacctagcgcaggacttttggtaatccataaaatggattctgagactgcgacggcaaggctgtcctgtcccccaggcacccaaggatcctgccagacagcacactttggaggaaggtctgcagggagcagctgagccatttgttcttgaactctgggaggcagaagtccccgcacccatcatgcgtggactgataggacatcttttcgtggtgtgcaccagtgctttccacacttgacagtggttggctttgatgaaccctcatgctgcaccttcagagccagtcctctagtttggaataaaaattgcagaggtggtttttgggtctttaccacctgcggctggtggacagcagccagtgtgtctggacacccaggggcattgagactgcatgttgtcacatgaccacttctcttcacacatctgctttcagtgcctggtgaaaaatagaccttggcctaacagtgtgactctctccaccgcctcagtgtagggaagggtccaggccagggaaggagcaccctctagtggaggcgggggtgaattcttaggtcgagctgatgcaagaaactccggtagccagcctctgtgaccttgtacatgagtttggtgtgcctattgtgatttaaaacaggtgggttatcaagaggaacttgagatctctttattacatggacatttacttcagggggaccactgtaagaaaagccaaactccaagaccaagtaagttagaggagtcttgattttttagacttcactgcggagttctgtacaccctttgccctgatgaatttgaatgggtttgatttgcaaatttggatttacacccattgttttggaagcacatcagctgaataaagttgaggtttattttatttagaaaatca

SEQ ID NO: 60 - DNA, 1469 bp, Homo sapiens
aaccggaaggggggctgtgaggacgtgttccgaggaagccagagccggagccgtggcctgcggggccggcgacatggatcccctgttccagcaaacgcacaagcaggtccacgagatccagtcttgcatgggacgcctggagacggcagacaagcagtctgtgcacatagtagaaaacgaaatccaagcaagcatagaccagatattcagccgtctagaacgtctggagattttgtccagcaaggagccccctaacaaaaggcaaaatgccagacttcgggttgaccagttaaagtatgatgtccagcacctgcagactgcgctcagaaacttccagcatcggcgccatgcaagggagcagcaggagagacagcgagaagagcttctgtctcgaaccttcaccactaacgactctgacaccaccataccaatggacgaatcactgcagtttaactcctccctccagaaagttcacaacggcatggatgacctcattttagatgggcacaatattttagatggactgaggacccagagactgaccttgaaggggactcagaagaagatccttgacattgccaacatgctgggcttgtccaacacagtgatgcggctcatcgagaagcgggctttccaggacaagtactttatgataggcacccaaggatcctgccagacagcacactttggaggaaggtctgcagggagcagctgagccatttgttcttgaactctgggaggcagaagtccccgcacccatcatgcgtggactgataggacatcttttcgtggtgtgcaccagtgctttccacacttgacagtggttggctttgatgaaccctcatgctgcaccttcagagccagtcctctagtttggaataaaaattgcagaggtggtttttgggtctttaccacctgcggctggtggacagcagccagtgtgtctggacacccaggggcattgagactgcatgttgtcacatgaccacttctcttcacacatctgctttcagtgcctggtgaaaaatagaccttggcctaacagtgtgactctctccaccgcctcagtgtagggaagggtccaggccagggaaggagcaccctctagtggaggcgggggtgaattcttaggtcgagctgatgcaagaaactccggtagccagcctctgtgaccttgtacatgagtttggtgtgcctattgtgatttaaaacaggtgggttatcaagaggaacttgagatctctttattacatggacatttacttcagggggaccactgtaagaaaagccaaactccaagaccaagtaagttagaggagtcttgattttttagacttcactgcggagttctgtacaccctttgccctgatgaatttgaatgggtttgatttgcaaatttggatttacacccattgttttggaagcacatcagctgaataaagttgaggtttattttatttagaaaatca

SEQ ID NO: 61 - DNA, 4540 bp, Homo sapiens
gggactggaggctgccgagggggccggcgcccgagtccgggattcggccagtggtgctgagcgagtgctggaccagcggccgtcctgtgcacctggcctgtgcgcgtgcccgctgctcggcttcacccagactaaggcgcgggcagctgcgggaacaggcggggtgggcggagggagaccgggaggcacgggcgccctgtgcgcggaggaggtgaaggcggccggggccgggacgccatgtccatggaggaccccttctttgtggtgaaaggagaggtacagaaagcagtcaacactgcccagggattgtttcagagatggacagagctcctccaggacccctccacagcaacaagggaagaaatcgactggaccaccaacgagctgagaaataacctccggagcatagagtgggatctagaggaccttgatgaaaccatcagcatagttgaagcaaatcctagaaaatttaaccttgatgcaactgaattgagtataagaaaagccttcattacaagtactcggcaagttgtcagggacatgaaagatcagatgtcaacttcatctgtgcaggcattagctgaaagaaaaaatagacaggcactgctgggagacagtggcagccagaactggagcactggaacaacagataaatatgggcgtctggaccgagagctccagagagccaattctcatttcattgaggagcagcaggcacagcagcagttgatcgtggaacagcaggatgagcagttggagctggtctctggcagcatcggggtgctgaagaacatgtcccagcgcatcggaggggagctggaggaacaggcagttatgttggaagatttctctcacgaattggagagcactcagtcccggctggacaatgtgatgaagaaacttgcaaaagtatctcatatgaccagtgatcggcgccaatggtgtgccatagccatcctctttgcagtcctgttggttgtgctcatcctcttcttagtgctgtgacggcggggcctctgggtgcgagttcctcctgcatatgaaccgaggggaggaggagaagctgagcacgtgtgacattgccgtctactcacattcctatcctggaaacatactgctgcactgacttttctccgtgtgaccccacaattgacatggctcctccatcccagcgctggaagggccagtgggaagaggaaatagatgtctgcactcctggctgcagctggacaacagaagccccatgccgcctgtccagttcggaggagaactagctgctgccttgccttccgggacctcgtttgctgaggagggacttacagactccactggtgttttgctgttgctcattccatgcatctttggcagctcttttcttctgctcagacccttccccgtgctcagacagtgcaccgctgtcccatctaaagaaacctgtcaggaatacgagcttctgggtatgtttcgtttcccattgctgtagcatttcttatcccctgagagctgatgattattgaggacagaaggctcagaaacagtttgtgacagaaaatgcagtgtttcatttttcagggataaatgctaagataaaattgcttttccaggtcatttttttttgtggtaagaataactaatggaaaataatgaaacaccctggggtttgggggtgctaacaacttgtggctttaactgacaggagcaattaaaaagagcaagagggttctgcattggcatagcttagggaagggttaatgatgtcgccacaggtcagctcctgatccttgccgacttgatgttgctgtaccagggcttcctccccagaggtgcagcttgcgttttgagggtgattgctacatatgttgttgctaaacagctcagtaacacacttgaatgaatttggataccagattgtcctcattacagttcttttactcttagggcactctacactgggggttggggttgggagtggttagtacatttattacatttattaagaaacgtaatgacataaaaggttagctctgggccagacttctcttactctgtgggtaatggcaaggatgtgtaggtaaacttggttcttttttttccctaagatgacagcttgattttatcatctgcagtcaaataactgagccaatccaaatttaaatgatagatgctttaattgagtttaagtagctgaaactgctgagacactaaactttaaccttctgatgactttttaaaatgcctcaaatgtgcacatgtatataggatatttttataacttccctgatgaataatctgatattaaagtagtatttggacccagagccagaactcggtggtggaggctgctggtctctcctcaccaccttcttttgcacttggaaagaacagcaacatctggatagagttctggctttgacttctcatttccttgtctttttgggtgcattcctcagcacactttttttttaaacctttttgttttgttttgtttgtatttcatgtggttttatttgggggttttggttttttcacccttttttgtgatttgcaatgatgtgcttgcccagctaacttttgaattgcactttttaataaatattcttaacaatttttgaagaaggatattttatctcatttgagatcatggtaggttaagaaaatatgcctgttgatgaaagctaaaagcaaatttatgaaactaaaagggtgattgacatccatgtttacactccgctctaatgtttgatatataaataagttattttcaaattaggaaaaaacagtgagtattacaaagggcttcagatgtttagagtactaggttatttatgttttacaaagtttgaatcttctataaactaagaaaggggatgatccttagatttgcattaaaatatagaagtcttttaaagtaaatgtgaaccttgtctaagtactgtaatccacacaacacattataagaagcaaaccagcatcttaaggaattataaaattaccctatttaaaagccatgctattgttctgctattaccagatttattgtgccacacaaaaggatcatgtgtgtcagcaggggccgtttggaacaaacctagtcattaatgagtaagatactcctgttagttcagggaccaagttttatgacccagaggcttaatgatgtttggatatatttcaaatcggcgtgcttacctcactgatttaaattattttctaaatagtggccattgtagacctgactcaggctgaagctaaatagagaacaatttagaaagttaactaacaatacagtgcattctacccgtagggccaccatgcccttctgcccctggctgatttgatcctgtgtctgatcccattgcaccctgactgggcagtccctacagaaccagtgttaatttgaagggcctccactcaggctccaaatgtggcagccaaagagaacaatccagggaacctacatttatttttaaggacaaatatttcctcctcagtggtcctaatgttcagggctttagagggaacccaggtggtctcttcaccctgtgtcctagaatgggagagtaagtagacagtggtgataaccccacactgcttataagtgcatctttatagtatttggggctttcctacccctttagccttctgtacctagtaccatattccagttttaaagaactggcagaatgtgatggataacagaggaagagctcaatttatgtttattggaagaacattttacttaaatgatttgaggggtgggagggagtgaactactgagtttgccagagtgaaaatccatctgaaaaactcagctacctttagtttttagtcctcatttttggtcttgtctctgcggactgtgaagaatcacaatgctctatatgccctggactgtgtggcaaatgcaggttgcagcgtgtgtgttacatgaggatcttccacaatttcagaatgcacgccagagctgaagggggaaacttggtaacttgcccattattctctgcttttagccagagttaaacagactgatgggtctggtagccaacaacttggcaacttccactccttctcacctcgtgagattaagggctgtgaaaagaaatctagtctaactccaacagaaatctgtctctgttaagtgttttaccttctgtaagtagagatggtagagccaagatttttcttttggtaatttccctgtctataaagtgagaccaaagggatatctgttccctgttacctttttggagaattcataacatttgaagatcaaaaaattgaatgataaatatgaatggcttttcaattctgtggactttgtaccatttggcttcaccttgtactgcaagatgaatttgtaaacaaaacaaaattggactgtctggaaagctaaagttctgaaatatggaatgtactgcctctaatttttctttgtcttcctctcactggcatttttttctctcccaggtttcttaagaataatgttttttaaaggaggctttttgcccatcaagaataaaaagaaataaaaccaaaaaaa

SEQ ID NO: 62 - DNA, 5220 bp, Homo sapiens
atcccggctgacgttggacgacaaagatggcggcagggaccagcagttactgggaagatctcaggaaacaggctcgacagctggaaaatgaacttgacctgaaactagtttccttcagcaaactatgtacaagttacagtcatagcagtacccgagatggaagacgcgacaggtatagttctgatacaacaccccttttaaatggatcaagccaagacagaatgtttgagacaatggcgattgagattgaacaacttttggcaaggcttacaggggtaaatgataaaatggcagaatataccaacagtgcaggtgtcccctccttgaatgcagccctgatgcatacattacagcggcatagagacatattgcaggattatacacatgaattccataaaaccaaagcaaactttatggcaatacgggaaagggagaatcttatgggatcagtacgaaaagatattgagtcatataaaagtgggtctggagtaaacaacagaagaactgagctatttttgaaagaacatgaccaccttcgaaactcagatcgtctgatagaagagacaataagcattgctatggcaacaaaagaaaatatgacttcacagagaggaatgttgaagtcaattcacagcaaaatgaacactttggccaatcgttttcctgctgtaaacagcctgatccagaggatcaacctgaggaagcggcgggactcgctcatcctagggggtgttattgggatctgtaccatcctgttgctgctgtatgcgttccattgatgggacatcttcagggactcttgacagccaccgctttcacaccctggtctggaataaggaaacatcggagggagaagttgactgtcttgataattagcctgaccagcaggatgaatgcaagactgacagtgatggactctgtgacatggtcaggttgagctgaagccacagtttctctgtgctgtgttttctaacacatttttctgtttttaattaaaaaaaaaaaaaaaaggttttcagttgcttttgtctccctaggaggcaggtaaaccaatcaaaaacagagttttctgtgtttccatgatagtgttgaagcctaatgacaagccaggtcttacagctgggctcttcagaaaaccaggtttctacatccaaagactgcttttcttttagctgccagattggattgtgaataaaaataattcttccctctccctctccctctccccacggtctccctctttccacggtctccctctgatgccgagccgaagctggactgtactgctgccatctcggctcactgcaacctccctgcctgattctcctgcctcagcctgccgagtgcctgcaattgcaggcgagcgccgccacgcctgactgcctcggcctcccgaggtgccgggattgcagacggagtctcgttcactcagtgctcaatggtgcccaggctggagtgcagtggcgtgatctcggctcactacaacctccacctcccagccacctgccttggcctcccaaagtgccgagattgcagcctctgcccggccgccaccccgtctggaaagtgaggagcgcctctgcccggccgccatcccatctaggaagtgaggagcgcctcttcccagccgccatcccatctaggaagtgaggagcgtctctgcccggccgcccatcgtctgagatgtggggagcgcctctgccccgccgccccgtctgggatgtgaggagctcctctgcccggccgcgaccccgtctgggaggtgaggagcgtctctgtctggccaccccgtctgagaagtgaggagacctccgcccggcagccgccctgtctgagaagtgaggagcccctccgcccggcagccaccccatctgggaagtgaggagcgtctacgcccgggcagctgccccgtccgggagggaggtgggggggtcagccccccgcccggccagccgccccgtccgggagggaggtgggggggatcagccccccgcccggccagccgccccgtccgggagggaggtggggggcgcctctgcccggccgcccctgcccggccgcccctactgggaagtgaggagcccctctgcctggccaccaccccatctgggaggtgtgcccagcagctcattgagaacgggccatgatgacaatggcggttttgtggaatagaaaaggcggaaaggtggggaaaagattgagaaattggatggttgccgtgtctgtgtagaaagaagtagacatgggagacttttcattttgttctgtactaagaaaaattcttctgccttgggatcctgttgatctatgaccttacccccaacctggtgctctctgaaacatgtgctgtgtccactcagggttaaatggattaagggtggtgcaagatgtgctttgttaaacagatgcttgaaggcagcatgctccttaagagtcatcaccactccctaatctcaagtacccagggacacaaacactgcggaaggcggcagggtcctctgcctaggaaaaccagagacctttgttcacttgttgatctgctgaccttccctccactattgtcctatgaccctgccaaatccccctctgcgagaaacacccaagaatgatcaattaaaaaaaaaataatataataataattcttgtcctcttattttacactcataatgagaaatcacaagttctttcttgatgatctgtgctatagatttctactctgtctcctcaactctgttgatatttggggaaaattctgtttttcatagattctttgagatgctgatggaccagcttcagcatgtttgaggttgtctgaaatggagatcactgtaaaactgtctttttcttttaaattacaagtacactggggttaactgtattgctggaaaaacatcaagaatgacagtcttatatttaaggcaccagtcattgtttccattttttttttaattcttcccttggattaatattttctactgaaaagaaatgaaatctcagttccactatgataaaagaaacgaatcaccagtgtctgtcagtgcccccactgctcctcctcataccagcattgacactggtagctgaggaaggggactgctcaatttctaatgtgatctattcaagaagccacatataaaaaggcattgagggctcactgtccagagaattgcttttgtaaatgctccacaacgtatgggcaaaagtttaaggactactgcctgatgtaccaggaatcctgagttctgtgaaaatctgttcattccaaatctgttaagcatttccaaacatccagagaatggtttcactgttgagggtgcatgtggcagaatctgtctctctctgcacctgtcttctgttaccatccctggacagtgacagattttaagccagccaccagaattcttttcgagttaaccatttcttagtttctgtaaattcatgacttgtcttactgaactacagcctggtttgtagacttccaacatctacactgctgctcttcaccattggaattcactgtggtatttatagtattggcttcagtccgagccacaggcaataaaaggatatcagctgtagttctcagctacatcatggtgtatagatgctgttattcaggcgaacttgctcatgggtggactaacacctggtttggtacagagactgagaagtttttcattctggtgtcaaagttttgttacattatgggtgtgaagggcatttgatatatttttcttaactatggggtttatttttctaaatgtgggttgattgactgttaattgattcagggtacccttaaaagaaaagaagttttcccattgtgaaccttaaatgatcagagaagtaagttcattgattaaattctctgttgggagaacaaaacttttctcccttgacactttattatctttgatttttcaaagggccttgattggtggttgtgtctcggttaaaatttatgggactttgctatgtagttggcatttataaaatctgaagtatcataaataaagttatttatttaattatactaccagtcttttttactggtctgattcttttgtgcattcattaaagctgattgtgtgagagtgaactgggacacaagctagtctagctcactgcagccaagcaaaccctgttgatggctgatgggcctttccattagggttttgcttatgtgaagtaatggaattatgttggttattttctttatgaaaataaaccagttcttccaaggaagttaaaaggcttggtatggatgttggtgtcagataggtctgactaacctctccgtgctgcagcctatactaaggtgacccagggccacatgtagacagctaggccagtgctttttcctcttagggtttctttgcagaaagaaacctccagcaagggaagagaggtgtgtgtccacaggaaggggctccgtggggatcccatgaagggatttgagctctttcagctccatgtcatttaacttttttgtttaaccaccttggctttctctccttttttgctgtcctccttacggaccagttaccagattcagaggctaacagttagttacttgttaatgctagtcacagccaggaggtcagaaggaattttctacttctggatccaaatgttacctcttaggggaagttatgccccctcaactattgtcttattataatgaatctttcctttttggtccttttaagtaaccactcaaaacttttcatttcactgaaaaaatatgaaaaaccatgacaatagggctgggtgcagtggctcacgcctgtaatcttagcactttgggagaccaaggcaggcggatcgtttgaggccaggagtttgagaccagcctgggcaatgtagcaagactctgtctctgcaaaaaaaattaaaagatacctgagagctcactttaatatcaaggtatttgcatccattcccaccctgttagctcttaagggaggagggaaatcaattccaaccatactttcctgtgatggaagatgtttcctcttgaaaaaatgccaatacagatttttaaaacctattgttttccaaatgcactttgtaagtttttgcttttaaaatagcttcttggaaccaattttattgtatttgtacttaatttttgttctcatctaaatgtgcattttctgactgtatagaagaagctttggtatgtaatttaataataaattagaaatctaaatgaaaaaa

SEQ ID NO: 63 - DNA, 1160 bp, Homo sapiens
gtgtgaagtaagcaatctattttcacttgctattaacagcaaacgtacaactttatctcttatttgacttcattatttggctttcaaattaacaacatgaaaactatacagaaattagtctgtgccctataagacagagatttagataatttgttcaaaacatgagatgatattcagatattctctcaaaggcaggactccaacaccgcaggtggaaaaccaacaaaaggaagaaaacagaaaggaggaaagggaagatgaaagaccgacttcaagaactaaagcagagaacaaaggaaattgaactctctagagacagtcatgtatcaactacagaaacagaggaacaaggggtgtttctacagcaagctgttatttatgaaagagagcctgtagctgagagacacctacatgaaatccaaaaactacaggaaagtattaacaatttggcagataatgttcaaaaatttgggcagcaacagaaaagtctggtggcttcaatgagaaggtttagtctacttaagagagagtctaccattacaaaggagataaaaattcaggcagaatacatcaacagaagtttgaatgatttagttaaagaagttaaaaagtcagaggttgaaaatggtccatcttcagtggtcacaaggatacttaaatctcagcatgctgcaatgttccgccattttcagcaaatcatgtttatatacaatgacacaatagcagcaaagcaagagaagtgcaagacatttattttacgtcagcttgaagttgctggaaaagagatgtctgaagaagatgtaaatgatatgcttcatcaaggaaaatgggaagtttttaatgaaagcttacttacagaaatcaatatcactaaagcacaactttcagagattgaacagagacacaaggaacttgttaatttggagaaccaaataaaggatttaagggatcttttcattcagatatctcttttagtagaggaacaaggagagagcatcaataatattgaaatgacagtgaatagtacaaaagagtatgttaacaatactaaagagaaatttggactagctgtaaaatacaaaaaaagaaatccttgcagagtactgtgttgttggtgctgtccatgctgtagctcaaaataaagaagctattttaaaaaa

SEQ ID NO: 64 - DNA, 4890 bp, Homo sapiens
gagctgcagtcagatccggggatggagggagccggagaagaggagtgagaaggccggggaggcaggccctgctgtcttcctgcaggccggcagcctgctggcagtggaggaccaggccgtccaggaaaggaaggggtcaggaggtcgggcagggcctcagcaggttcagacaagtccccagaagggagctgcaggcgccctcgagtccaggccccaagcctggctccggttgtccaaagagggcctaggccaggcctctggtgcggaaactgagtcacagccagacctcagggcacggcctagacgcttacgagccaaagttaggggtagagagcagagacctccggggggtctcagggagtagggggcttcagggcctcccagtctagagccggattggcgagttagacgcttgtagatccaaggttggattggggtggggtctctgggacgttggatcgctacgcaaggattggggggattcaagtgcttagagatcgaagtctgccctgggtagggggagtcagacaattggaaagcctaggtagttatttggggaggggtctctacgccttggcgaagcgcacagctgcatctttttggcttgaggcctgaggccttgtcgagaagcttccgtgaaagggtgggccagccgggccacgagaaagaaagtgaataaatcaggaatataagtgggcggggggcccctgagaggggggtcgcaaagggtgagacatggccaccaggcgtttaaccgacgctttcttgttgttgcggaataattccatccaaaaccggcagctgttagccgagcaacttgctgatgaccgtatggcactggtgtcaggcatcagcttagatccagaagcagcgattggtgtgacaaaacggccacctcctaagtgggtggatggagtggatgaaattcagtatgatgttggccggattaagcagaagatgaaagaattggccagccttcatgacaagcatttaaacagacccaccctggatgacagcagcgaagaggaacatgccattgagataactacccaagagatcactcagctcttccacaggtgccagcgtgccgtgcaggccctgccgagccgggcccgggcctgctccgagcaggaggggcggctgcttgggaacgtggtggcctcgctggcgcaggccctgcaggaactctccaccagcttccggcacgcacagtcaggctacctcaaacgcatgaagaatcgagaggaaagatcccagcattttttcgacacatcagtaccactaatggatgatggagacgataacactctttaccatcggggttttacagaggaccagttagttctggtggagcagaacacactgatggtggaagagcgggaacgagagattcgccagattgtacagtccatttctgacctgaatgaaatattcagggacttaggggcgatgattgtagaacagggtacagtccttgacagaattgactataacgttgaacagtcctgtatcaaaactgaagatggtttgaaacagcttcacaaggcagaacagtatcaaaagaagaatcggaagatgcttgtgattttaatattatttgtcatcatcattgtgctcattgttgtcctcgttggcgtgaagtctcgataagtggcattgggttttcgtgtgtgccgcgcgtgtggatctcccgggtgtgaggggcttggcctgcgccccgccagctgcccgcagaggtgcagcctcgaggaatctgagggcgtcggggcagcgaacctttgcatccacggactcctccttccctagtcctgctcaagcggtccggggaatgggtttttgtttttccttcattgttgagaatttaaggacctttgatactgctgcacaatagagattgagttctgggatcagttataatatatattttttttagaaagagaaaatgagctgagagtttacaggcactgcagaagctgttcagtattatatgtgtatatgctatttttttagcagccatgtctgagcagaatgttaacataatttttggaaaaattttctttaaaccatctggtttttaagaaatttggtaccaaaaattgatgagtagaggcaaaaatgccccttcatctttctctatatattttccagttgaaaacaaactaagaagtcctttaagaatttataatccgttccccattaacttaatttagcttttccatcactgttaatgatcagagtaacaaagtgtgaaaaataagaaaccatcattgatgttaattaacacatttagatgggccagttaaaacagcttcataagttttaaattaattgtaaatggaatattcctcatttaaaatttttgcactgcattttctactgtaaaccaaaagaggttactaagcaaaaccacctaaatttaagttggtgatttaaatgaatctcacattaaaagaaagcttgacagtgttatgaaagccaccagactcagccagtgtgtccccatgggtatccccagccatccttgctcaatccattacttatatactaactacataatgacctgttcaaaccagactctatttaatgaactgtgaatttacacagaggccattttaaatgggtcaccccatttaggattagtggatctcaaattattaaccaaacatcactccatttcaaagtaaaatattccaccagcgatttgatttattggctcttccattgccactgagcaatgcccaggaagcaggcacattgccaaggactgggggcatcttgactaggaagctcctcgtttgtgtgagcgtgggtcagaccgccaaagtaggacttcatcgtttacctacctattatcaatatggtgcttgaatatattcctataactgtagaacagtgtggaaagtgatggtaactttgaagttgttcatgttttattggctttgttttaattgacactagtagagttttaatggtctttgtgtaaattttaatggcttttccattgtttttgcttctcttaaaaagtttaagaagaatatgacctcattaaatgtgctgttttatttggaccagtcacacaaaatgtctctctagagttgactttaaagttgtttacagaaatttaaactcaattccagagattgaagttgtccaaacagctcatgggcttagtgtccaaacccctgcccagccttccctttccaagttggtgccacctccaggtagccattggtggttttcctattactgatgtggctgtggaatgataaggtcctagaggggccctggcatttcaggaagcggacctggtattccctgacaaacattgcttaggaaagagggccggagaataagaagccagcacctcatcagtcagccctgcaatgtgagacttccgtagctgttgagagtcactgcaggtgttctttcatcccatctgattttaacccatggttgagacgttccaagttagatctgctgctcttaggtgtggggctgtccacattagggaacttgcctcaaaaacagtccacagtggcaataccggacttctgttcaagctttttaaagtgctgagccttacaaacccctgaaggaaggtgaccctttaagagaggatcatctttttttatatttattttcaccaaatagggtgatgagggttggtttttgttccctcaacccatttgggtaaaataacggatctgattagaaactgttttaaggaggggctgggctcggtggctcacgcctgtaatcccagactttgagaggccaaggcggtcacgaggtcaggagttcgagaccagcctagccaacatggtgaaaccccgtctctacaaaaaatacaaaaattagccgggtgggacacgcctgtaatcccagctactcaagaggctgaggcaggagaatagcttgaacccgggaggcagaggttgcagtgagccgagatcacaccactgcactccagcctgggtgacagagcgaggctccgtctcaaaaaaaaaaaaaaaaaattgttttagcgctgggtttcccaaggtgggagagacagacccagcctggagctggcccctggcctgtgtgctgacttcttggggtcctcaaaccactgtatttttctgttgagcctgtacttggggagagatcagtagcatttgaggaagtaagagaaaagaatcatggtacctcagggtttctttccctttactcgctggcagccattgtctgtgggcacctcatgtttttccacactctactgggccgtggaggtaacgatcacccaggccagtctcctctgcctgggatgcgccctctgagaggaggcctagcagggcaggctccctctgggcatccctggatgcagcctctggacacatgcctcctttaaagtgtccgggtgcagctcaggttgagtggaggtagaaggagaaacagacatgtttaccacgcgttttccaaagctcctgatctttcccaagattgtaactgaaaactgctgtctcttgttttgttcgttttgggggtggtggtgctggctgggccatgcttgtgaagtgatgtgtgtctctgatttaacggattcactgttttctctgctaattgagagagcgttatttacattatttatttgttttgacacaagtgctttcagtgttttatcctagctaatggcttcttaaaggtaataaaacccttccaacgtaattggtcagataaaactttttttcttgtatgcttaaataaagcaattagtgaagcacttctatccaaaatgacttttttgtccttttttaaaaccaatttactgttactggaaactttttgtacaataaagcaatcacgcagattaaagaacatcctgcaatcctagtattaattttaaaaaaa

SEQ ID NO: 65 - DNA, 2210 bp, Homo sapiens
agtgacgtctttgccccgcgccgcgccgtcccacccatctccctggcctccggtcccaacttcgcttctctgctgaccctctctcgtcgccgctgccgccgccgcagctgccaaaatgtctacaggtccaactgctgccactggcagtaatcgaagacttcagcagacacaaaatcaagtagatgaggtggtggacataatgcgagttaacgtggacaaggttctggaaagagaccagaagctctctgagttagacgaccgtgcagacgcactgcaggcaggcgcttctcaatttgaaacgagcgcagccaagttgaagaggaaatattggtggaagaattgcaagatgtgggcaatcgggattactgttctggttatcttcatcatcatcatcatcgtgtgggttgtctcttcatgaagaaccagcggaactcaaaactgctgttcaagaaacctcttcaagacttttgacttagaacctgctatattatcaagcttacctactgttatctctaaaattttttttgtgttaatgtaaagttgaatttctaggaaacgtgcctttgttttttaatatgcactccaaattagaaggccggccccgtccacattttgcacagtgcctttacagatttacgtatgggctgatgaagaggccttcttaagttccagagtgctataatctagatgtaatgttgtcactaattaattgccattactcccagttagttacccttgtcatttggcattattttcagaaccacattttaaacctttgggtaatcagatttccaacttatgccttccagaaaaaaacactactgcctaacacaaatctgtgataacaacaggctgtgccttattttgataattttctgattccctagaagagaaccctctactttttgtaagcactactgactctcgctgtatttaagatgctggtgaagagcttttgctcttgcattagatttgaagatgtttacattgttgttattgttatgtatcacttgctaaaaatattgttttaatcagagataacctctttaaaaaaatttttaaagaactatggctatgaccaaagcttctattttgccaaaaagttaaataccgataaaatggccttaagtgtattcctgacagttaaattcagaaacgtgccaaatggaactcaaggtgccccttcagaattaaaatcattaccttgtgtgtgaaccttctacatcttcataggcctttcttccttttgaaaggctgtagacagtgtggctccccttctgattcagtattttgcatgggggttagagaaggtttgaggtagactctgaccgtctcataaaagagttctacccagcagttggcagattatcagctgtggactccagcatgtttctgataattatgcaagcaacaattctgtagcctcaagtaagaccacctgtgaacttgatcattatctggcccaaatatgaagataaactataactttggagtttgtttcctatttgtattcacattctgcttcctaaatcagttttctaaattatgcctgcaattaggcattggtcaggggtgaatggctcttttcacagagagtagccaaccagagacctttgctttgatatcatcaactgcagagaatgctgttgatgggaatgctggaagcagaaactttgtcatcggaaaaacttttcttgtatgcatgagactcaacatcaggatccacagcttaaagatgggaattcaggtatgaaagaaaacaggcaaggaggcactgagggagaaagacacagactttatcgctctgtggctcattgttactggaatattctaaaactcttgttcacatgctattatgacttataaagcagcaacagctgaggcgcaccaggacacagcttccatttctttaacgtctgttcccttaacatcgctgaaatgatttactgttgaagagatgccttgcggtgtggccagctgtgaggagaaagcagctggcagtgttaggacattagtccaccttcagcgcagggtctctggccgggtctgactcagaaaccttggtactcgccccttggccacagtgcccagacccatgtaacccactggctcctgcattaacccagaaatacctcgcttctatctgtgcacttagctgggaacttacccactgtaatcacctaaataaagtgtttataaacatgaaaaaa

SEQ ID NO: 66 - DNA, 3140 bp, Homo sapiens
agtaagttccagcgcagctagaccgcggggtagtcggcgcgaggcggagcttggcagttccgtccacttcagccgcagcgtccctcgccgggtgtctcgccgcagcctccggagaggaacagaccctcactctctctgtcagaaaaatgtctgctccagctcagccacctgctgaagggacagaagggactgccccaggtgggggtccccctggccctcctcctaacatgaccagtaacagacgactacagcaaacccaggcacaagtggaggaggtggtggacatcatacgtgtgaacgtggacaaggtcctggagagggaccagaagctgtcagagctggatgaccgagctgatgccttgcaggcaggagcatcacaatttgagagcagtgctgccaagctaaagaggaagtattggtggaaaaactgcaagatgatgatcatgctgggagccatctgtgccatcatcgtggtagttattgtaagtaagtatcgctgaagttgctggtggggtgaagaggtgggaaggtcctggagtcttctccctgcctgcctgcctgcctggggagtggggctgctctgactgaggtatggagaccgctgctatgggatcgtcacctggttcgggacgggggaagggcagagacaagggatttctttgatggacaagccttccccctgcaacgcattgcagggagatggcgcctcctgttctgaggaagtggggctatgctgtgtgtcactggcttgggttggagggagaccatggggatggggcacttaacaatggagagacctgaatgtctggtaacttggtgtaattcaccctcttgttttctcctgtctctttctcttttccgtctgggacttcctgattcctgtgtccagtctacttttttacttgagaatgtaccaccccttccctgttgtccattgccatccacattcatgtcctctgccctctgtttgctctctcaacacacttccccacccaccgtcctccattccagcccaggcttctccatcacccattcctcctttttcgttgcgttcatttgcactctgtccctcaacactagaaatgctgctcgtggcacaatctaagtcattacccgaagagcaacagctggcgcctcctccctgcctgctttttctgtactctcaagttcccccaaagccccaaagagttggaggccaagggaaggggcagggaggggagtggctgaggcgaagtacccatgaagctgcccagacttgggaggagaagagtatcggtgcccatggtgacttctagaaaacctggccactggtaggagctagggaggggctgggaagatggcagctcactcagtactgcctggtcatgtggagctttccttcctggaccaggcctggagagggtcctgggggtggaccaaagtccaacttggtttcagtgcagtacccttttcgaaagtaaaaacttgttttttgtagttatttctaatctgttcgtccaggattttccgtgtctttggggatcttacaactttactttgttctccagaggcctggagaacacttagggattgtgaaaatagcaggacttgtttccatcctagaagcagtcccatgtgcttctagctggaaggagctttctcttctttacattttctacagcattctgtatgagggcaccaaataaatccatctagctggtagttttatctagccaaataatttaacctagctcccagttaattgttggcataaagagagagattgcctgttagttatagagaaacagtgagtcaagtgcttaatttgaaagtaacaagctcagaggaagccactccttgccctcgttaaagagggtcctgttcctctcttcctgttgatgaaggagcgtgagggtgttagcagtgtgagatctttggacacccatggaatcctttcctccacaccacccgtgcacttgccaaagacagggatgaggcaagtggttcttcctggggcccggccgatcctcaggatgcagagaagtcatgtagacccaccagccccaccttggggggaggcgtgccagcctgtgtcaggtgtgcttgtgtattgctgtgctgtcatggggccctctccttgagagccgcctctctgttcttcctgtagtatattcccctttgaaccaccctttcctgtctgaattctactttgcctcctttctcttcctcctctttgcatggtttgtgtgtatagacagtggaacctgaggatgggatctgctcagcctatcttcggggcaattgctgagcttcaggatgggctattaatgtgggataagcccaggtgcaaggggaggagggcaggctgggaacagagcggagaatgcccatggccctttattccttcttccctcggtccacgaacaggaagaggctgaggccatgctgggcagggtctggatgcccactttccatgcagcagcatttcattgctcaaaaccatccttcctttcctttcgcccttgtttcccacattcccttcgtcctgcccaagggcgggactgaagagctggaagaaagcagtcagtaccctcccaacggcccccctcgaaggtctccactctcctctgggctcctccttgcctaatgcagggggtcaccgctggagaagaaccaccactgtcctcgatgtgtcccaagcctggagcgaatccgtcctcttggctctcccagccctatcacaggaatcattcctgggtttctgtccctctgaggctcaccaggtgtagttggccttgttctttgggggtattagcccttctactttctttctcacccaccctgtaccctcttctgtgtgtctctgctatccccctttcctcccaccacccatgtgcatgagcaaatgtgcaacaaaaccctgggactttgcagtcaaatgaagctgagcttcccacatcccgttcttcggtttgccatgagacgatgtggggtttccactgtgtgtctgtcatcacctctttgtctttttttcctaaccctgatctcatacttgtatagagtaataacaacagttgtacttccaccaaaggcatgtggcatatttaccaatgtcatgtattctgaacaaaggcaaaaaatacaaattcctaccattaaaa

SEQ ID NO: 67 - DNA, 1090 bp, Homo sapiens
agtaagttccagcgcagctagaccgcggggtagtcggcgcgaggcggagcttggcagttccgtccacttcagccgcagcgtccctcgccgggtgtctcgccgcagcctccggagaggaacagaccctcactctctctgtcagaaaaatgtctgctccagctcagccacctgctgaagggacagaagggactgccccaggtgggggtccccctggccctcctcctaacatgaccagtaacagacgactacagcaaacccaggcacaagtggaggaggtggtggacatcatacgtgtgaacgtggacaaggtcctggagagggaccagaagctgtcagagctggatgaccgagctgatgccttgcaggcaggagcatcacaatttgagagcagtgctgccaagctaaagaggaagtattggtggaaaaactgcaagatgatgatcatgctgggagccatctgtgccatcatcgtggtagttattgtaaggcgggactgaagagctggaagaaagcagtcagtaccctcccaacggcccccctcgaaggtctccactctcctctgggctcctccttgcctaatgcagggggtcaccgctggagaagaaccaccactgtcctcgatgtgtcccaagcctggagcgaatccgtcctcttggctctcccagccctatcacaggaatcattcctgggtttctgtccctctgaggctcaccaggtgtagttggccttgttctttgggggtattagcccttctactttctttctcacccaccctgtaccctcttctgtgtgtctctgctatccccctttcctcccaccacccatgtgcatgagcaaatgtgcaacaaaaccctgggactttgcagtcaaatgaagctgagcttcccacatcccgttcttcggtttgccatgagacgatgtggggtttccactgtgtgtctgtcatcacctctttgtctttttttcctaaccctgatctcatacttgtatagagtaataacaacagttgtacttccaccaaaggcatgtggcatatttaccaatgtcatgtattctgaacaaaggcaaaaaatacaaattcctaccatta

SEQ ID NO: 68 - DNA, 5000 bp, Homo sapiens
cagctagccgcctcctgcaggggctcgggagagcaattcggcggcccctgcagggcagctgaagccatggaagcctccgcaggtcgctgatcagggccaggcggctgcagcagcgactgcagaggcgctgcgccaagccgggccggagtggtgcgagccggcggggctgcggagggccagtggactcagcccccgggataccgcccatcccaccccttactcggacccacagcctcatggccatgtccctgccaggaagtagacggacctctgctggatcacgcaggcgcacctctccacctgtgagcgtgcgggatgcctacggcacctcttcgctcagcagcagcagcaattctggctcctacaagggcagtgacagcagtcccacgccaaggcgctccatgaaatacacgctgtgcagtgacaaccatggcatcaagcccccgaccccggagcagtacctgacccccctgcagcagaaggaggtgtgcatccggcacctgaaagcccggctgaaggacacacaggaccggctccaggaccgggacacagagattgatgacctgaagacgcagctgtcacgcatgcaggaggactggattgaggaggagtgccaccgcgtggaggcccagctggccctgaaggaggcccgaaaggagatcaagcagctcaagcaggtcatcgacactgtcaagaacaacctgattgacaaggacaaggggctgcagaagtacttcgtggacatcaacatccagaacaagaagctggagacgctgctgcacagcatggaggtggcccagaatggcatggccaaggaggatggcactggggagtcagccggtgggtcccctgcccgctccctcacccgcagctccacctacaccaagctgagtgacccggctgtctgtggtgaccgccagccgggtgatccctccagcggctctgctgaggatggggcagacagtggctttgcagcagccgatgacacactgagccggacggacgcgctggaagccagcagcctgctgtcgtcgggggtggactgtggcaccgaggagacctcgctgcacagctccttcggcctgggcccccgcttccctgccagcaacacctatgagaagctgctgtgtggcatggaggctggtgtgcaggccagctgcatgcaggagcgtgccatccagacagacttcgtgcagtaccagcctgaccttgacaccatcctggagaaagtgacccaggcccaggtctgtgggacagaccctgagtcaggggacaggtgcccagagctggatgcccacccttcagggcccagagaccccaactcagcagtggtggtgacagtgggtgatgagctagaggccccagagcccatcacccgtggacccaccccacagcggcctggtgccaaccccaaccctggccagtcggtgagcgtggtgtgccccatggaagaggaggaggaggctgccgtggctgagaaggagcccaagagctactggagccgccactacatcgtggatctgctggctgtggtggtgccggccgtgcccacggtggcctggctttgccgctcccagcggcgccagggccagcccatctacaacatcagctccctgctgcggggctgctgcactgtggccttgcactccatccgcaggatcagctgccgctcgctgagccagccgagtcccagcccagcgggcggcggctcccagctctgagggggcccattccggcagcggcgcctgcggcctgaccactgattgtagggatgccgttcccccctcccttctcccatgggcatcatcttatttatttagttttgggtgtggaactgtttctttttttcaagatgttaaaacagtcccgtggaaggagcaggggttggagaaaggcatcccaaagcttcgatggagagcagggaagggggacccaaggcaggaggtacaccagctggacaaattgcagggaggggagggagcgagggccaacccggcccctctgtccccttggctcttcagacagggccagccctgctcaggaagtctctggctgtcttcatgtggggaagccgggcttgagttgcccataggcccctgccctgcaccatcctgtccagtgccctgcgcactccatgccgtctcttccaagccaccttgcccgcagcccaggctcctgggccagtgctctctcctcaaatggaggcagccatggcctgaagtgcagatcactgacccagggctcagagcagaggccagaaccactgggccggccggcattccagcctccccagactgctgcccaccttgggactcaggagctcagtcaaggccacaggctggaggagagacggggctgggcgcaaggtggcggagggcagtgtgggttctgtgtctgtctgttcatcccaggctttcccgtcatccctttcctcttggcacttctgggtgtgtcagtcattattcctgtgaggtagctaagcccggcaagctcagtgctggggtaggagggcctgcctgagtcccagctcccagctggagaatccaccagcacaagaagaggaggcaggggcagaaacccaagggggctcccccagccttccaaggtgaggccatctcatctgcaggctgggaggcagggctggactcaggaacccacagcttactgaaaaagccagaggccatgactgcccccagaaacttgccccgagtttctctggggccctcgggcccaacttctgctttgcactatgttcactttggggttggttctcagccatccaagggtctccagtgaggtggctgcttgctgtctgagatgagggttcctaaaccttaaacctctctgcctctggaggagggtggggtattctggcaggatgaatcgcaggatggcgcgtactgaagccacgatgttcatccaggccaaagcagggtgtcctgggataggtttcctaggcaggggcgtggcagagcaggtaggcgccctgcagcctccctgctcccagcccaaggccagtcggcctgggaagttcactgccccaactcttttcccgggaccatactgagtcccccagccacgctgctgacattaccattattattttaccaagtaaactcactccttttcccccacaggggttacacccatctggttgtcccacccactcttcagaggctaggccccacctctgggggttggagggaccctgtgtcttactcgcccctctggcctaagggccactctggttatctgccaaggttgcttgccctcaccccaatgctccaacagccattgcctaactcatgggctctgcccttctgctcggtgccctccacgtgaggcggggcacctgcatgcactgggagggggcggctggcccagccctcggggcaggagccccctctgccacacgctttgtgcctccaaagctccccccgccttggtcagggcctcagaccagccaacctttgtggaataagccccagcccagccaaaccaaacccagatgcctgaggcctggctggggctgcccccgcaggacactgtggccatgccacggagggggcagtggacaaaaccaatccaaagccaagccgggactggctgcggacccagcctcctgtgccgcgcactcacggagctgcgtagtctcctcagacatagtcaaagctttgccgagaaaagaaatgtatgaactatatttgacaacataaaatctctctatttttcaccactggaatttagtcaagcttcaggcccctctgctcctgtctgtgtcttgcgtctgtggccttcctattgtgtcttgtgttttggtggatgtgacagggctggggccacagtctactctgtctctgctgctagagaagccacctgtggaggactgggctgtggttgggcctgaggcctgtggaggaggtgagtgtagccagcagcggccgtctactcctgttctggcctgagaccaccggtgtgggtcacgagggccctggcccacagtgttgagggtcctctctttcgggggctctcctggggccttcgatgggcttttcttcttgtcagtggagggagcagctccccactcagccctgggacaggccctgggactgtggtggccggtggccctggcccagctctggagtgcatgtgtgtgtgctcagatcccgcatctatgcaaaggtgcaggctgcctgtgaggctccaggcggtggaggtgcggcagctgctgctcaggtgccatgccctgaagaggcagggtacacatggggctgggagggcaaagatggggcggggcctccccctgagagagctcaccctccacagtgacccttttccttcctgcctaatacctcctcccgttgggctgtgacttttcctcctgccctcagcctctgaaacagaaatctttggggcctcccctttccccagcgtctggcaagagctgatgaggtcctgaggaacagtgtccccaggaaccaccttctggagcctagcggccagacgtggcttctcctgagttctagggctcgggccagagtggcactactgcccggccagtccaggctcaggcaggaatcggacgctggggcccgggctctgcacagagagctgggcttgagtggagtttattgtagatttctcccaaggggatcacttagcttctcactgacacacccttcccaattgccacaagcgcaggggtatcttacagcactttggggaggggtgggacaaactgcaaggttctggggccaaggcctacccaggggcctctgcccagagaactcacaaccccctctctgacctaggggacaatgcaaacaggtcacagtgcattcccatattaggccatccccttcacgaagaattcaggggatgtgggaagtggggaggcggggagggatcttgactcttgtctcctttgtccttttgttcagacagagttgtacctgcagcagacaactctgaattaaagcatgaaaacacagcaaaaaaaa

SEQ ID NO: 69 - DNA, 2770 bp, Homo sapiens
gattgcgagccaggaggaggaagccggcggtggccccgtcagcagccggctgctgagaggccggtaggcggcggcggtcccgaggggcggcggccgcgctgctccctgagaacgggtcccgcagctgggcaggcgggcggcctgagggcgcggagccatgaagctgtacagcctcagcgtcctctacaaaggcgaggccaaggtggtgctgctcaaagccgcatacgatgtgtcttccttcagctttttccagagatccagcgttcaggaattcatgaccttcacgagtcaactgattgtggagcgctcatcgaaaggcactagagcttctgtcaaagaacaagactatctgtgccacgtctacgtccggaatgatagtcttgcaggtgtggtcattgctgacaatgaatacccatcccgggtggcctttaccttgctggagaaggtactagatgaattctccaagcaagtcgacaggatagactggccagtaggatcccctgctacaatccattacccagccctggatggtcacctcagtagataccagaacccacgagaagctgatcccatgactaaagtgcaggccgaactagatgagaccaaaatcattctgcacaacaccatggagtctctgttagagcgaggtgagaagctagatgacttggtgtccaaatccgaggtgctgggaacacagtctaaagccttctataaaactgcccggaaacaaaactcatgctgtgccatcatgtgatgcagcctgccagaggcccaatgctggaatggcaccatcattcacatcagaactgcagcccctggaaaagaagagacagccatagacgaggagccagagtgggggcagactggccatttttattttgaagttcctgcgagaaatggatggtggaagggtggcgaatgttcaaattcatatgtgtggtagtgattcttggaaagaatttgaggtccccaaaggtgtatttttgggcaaatgaaaccataaactccgactggcttctgtagatgccaaagggctctttttcagctaaccctgggaaggctctgtgggagggaggtcggagccagctgtttctcgatctttggtatatctttggatcttatttgtacattaatgatattaacactccagtggggggtggggagtccctgatgctagggctggggtgggtggagtttgaagactcttgggaaagcctctcctggggccactgttgggggtgggagtgagcccaccacagaggccacaggcaggcccccacttcaggcccaaggcctggggcggggggaacagtcactgggtctcagattctgagactgttgtttagcttacctttctgctaggattggcttcccgcagagggcagggcccatcctaagcagcttccaagtcccacaaaggtggcttgtgggaggatttggaaggagctgcattgtgggcggggagtgtgtgggttgggttcgtaccagcaagtagactaggaactgagcccaggaaagggggatgttttcctggtgtttggatggtcagctgggagtgtccatcatcaggggaagatcaaacacaggtgcactcagctgcccagggcctctgggacacttgccttgacttgcaacttgccttgaacatcacgatcaaagcagcaggtgctgtggtctctcaaaattgatttttatttgactctgtggctctaagactgccttgaaccgcctgaggcctatgcatctgaacaagtgggtctctcccttgagcaccaggagtgggtgccagccggccccgaggattcccagcaccccacctatggtcttgccagcataggcttgctagttccttcttggtcagaggtagctgcagaggggggaggccaagggtttggtctaagctgtgccctgccacctggcaggaggcccactcactgcccaagtcatggcaacaggctggagcagcccaggagatgggcctaaaatgttctggatcccttgggtcctagtgttatgttccagtctgcccacctgtgctcaggatgcagccctgggatccagcacccatggaagcttctgctgggatggtgtcacctatgggttttgaaccagtgtggtatggtccttgggagctctgctctgagcttgccacactgctgagagcacccactgtcctgaccagagtctcagtggtcctgacccccaatgtgggcaggggctgggcaggagggtggggtctgctgtgggttcagaggactccacctcctggctggtttacctgctgctgcccattttctctgggtactgctggccagaggactttagcctacccctgaagagcctgtccatgtcattttcctactgccatagataccctaagcccagggccccttgaggcccagactcagcctgcccactggtgccggagacggagtggagtgggcctggatccgagggatgctacctctccctttcccacttgaggaccctggggagagatgggggcggggaaaatggaggtatgaatttggggtaagaggaagtgagatctccgcttgcaggtcagcccctgccttgcagggcgggctggcttgactcaggccctgtgagatagagggcccagcccagccccacccacagatcccctgctcctgttgtgttctgttgtaaatcatttggcgagactgtattttagtaactgctgcctaacttccctgtgttctatttgagaggcgcctgtctggataaagttgtcttgaaatttcaaaaa

SEQ ID NO: 70 - DNA, 1390 bp, Homo sapiens
gggaagaaaagggaattccaacctgtggaaccttggggggtccccggggtcggcgccttcccattgactgtgggcggtgcaagggacggagcctctggcggctcgtgggggtgttggggtccgcagggggagggaggggagtgtcagagtgtgagcggggtacgggaattccaaatttgagggcctcccggctctggcgccggggagggagagctcaggccgccatgcgggacaggacccacgagctgagacagggggatgacagctcggacgaagaggacaaggagcgggtcgcgctggtggtgcacccgggcacggcacggctggggagcccggacgaggagttcttccacaaggtccggacaattcggcagactattgtcaaactggggaataaagtccaggagttggagaaacagcaggtcaccatcctggccacgccccttcccgaggagagcatgaagcaggagctgcagaacctgcgcgatgagatcaaacagctggggagggagatccgcctgcagctgaaggccatagagccccagaaggaggaagctgatgagaactataactccgtcaacacaagaatgagaaaaacccagcatggggtcctgtcccagcaattcgtggagctcatcaacaagtgcaattcaatgcagtccgaataccgggagaagaacgtggagcggattcggaggcagctgaagatcaccaatgctgggatggtgtctgatgaggagttggagcagatgctggacagtgggcaaagcgaggtgtttgtgtccaatatcctgaaggacacgcaggtgactcgacaggccttaaatgagatctcggcccggcacagtgagatccagcagcttgaacgcagtattcgtgagctgcacgacatattcacttttctggctaccgaagtggagatgcagggggagatgatcaatcggattgagaagaacatcctgagctcagcggactacgtggaacgtgggcaggagcacgtcaagacggccctggagaaccagaagaaggcgaggaagaagaaagtcttgattgccatctgtgtgtccatcaccgtcgtcctcctagcagtcatcattggcgtcacagtggttggataatgtcgcacattgttggcactaggagcaccaggaacccagggcctggccttctctcccagcagcctggggggcagggcagagcctccagtcggaccccttcctcacactggcccctatgcagaagggcagacagttcttctggggttggcagctgctcattcatgatggcctcctccttcaggcctcaatgcctgggggaggcctgcactgtcctgattggccgggacacacggttttgtaaaaaattaaaaaacaaaaaaagagcataaaaa

SEQ ID NO: 71 - DNA, 1920 bp, Homo sapiens
ggcgcggagctcgggcggccgtggaggaactcagcctcggccgcaggaggcgccgggagcggagccgccgggagtcgcgcaacaggtttccttctccatcgctgcgcccacaggggacgcgcgccctgccgggagaggggcttctcggttcgcactctcgctcccagtccaggcaaaatgaaagaccggctagcagaacttctggacttgtccaagcaatatgaccagcagttcccagacggggacgatgagtttgactcgccccacgaggacatcgtgttcgagacggaccacatcctggagtccctgtaccgagacatccgggacattcaggatgaaaaccagctgctggtggccgacgtgaagcggctgggaaagcagaacgcccgcttcctcacgtccatgcggcgcctcagcagcatcaagcgcgacaccaactccatcgccaaggccatcaaggcccggggcgaggtcatccactgcaagctgcgcgccatgaaggagctgagcgaggcggctgaggcccagcacggcccgcactcggcagtggcgcgcatttcgcgggcgcagtacaacgcgctcaccctcaccttccagcgcgccatgcacgactacaaccaggccgagatgaagcagcgcgacaactgcaagatccgcatccagcgccagctggagatcatgggcaaggaagtctcgggcgaccagatcgaggacatgttcgagcagggtaagtgggacgtgttttccgagaacttgctggccgacgtgaagggcgcgcgggccgccctcaacgagatcgagagccgccaccgcgaactgctgcgcctggagagccgcatccgcgacgtacacgagctcttcttgcagatggcggtgctggtggagaagcaggccgacaccctgaacgtcatcgagctcaacgtacaaaagacggtcgactacaccggccaggccaaggcgcaggtgcggaaggccgtgcagtacgaggagaagaacccctgccggaccctctgctgcttctgctgtccctgcctcaagtagcaggccggcccgggccgccaccgcccatcccagaccatggagcgcgctgggaaggacgcaccaaagccgggagctctgccctgcagggagttgccccaaccctttccggaactcagtctttagaaaagaaacgccaggttcaagaattgcaaaccagcctgtgcttggaaagatggttagttgataccgtccgatgattcttcagtaaagatagattcccacaaagttgtgcaatgtcattatatgacaccttgcactcttaccgtcttgacagaagccaagtaaggaactgaagttgtatctgactgtagggtgaatgtctgaggcctgcctcctaataaagactcaaggaggaagtcaattgggcatctgctaatagaatgaactcatgatggaaacttcagttcatttactttgtcctgaaaattccctggttctgttccattttgagcgaaattggccttgggaaaaaccacgttcttcctttccgattcttcatccggtctacgctatgcaattcctccccaaatatagatcttatttctgctcatttcccctacttattaaaatcacaccaaacacttactattttcttatctctttcactttttaaatatctttcaccaggttatattttggtattatttttccaaacatttttaagcactgaatatcgaacaagcactcaaattgaagtatcagtcatgttttgtgtatttttcgctgataaaaattatttaacatttatatttttacttgattacatatgcacatgtatgtaaatgtaaaatactaatattcactaatatatgtacataatgatcaattggtttaacttcttttatgtaagtatggtatataaatttcaagacgaaaaaa

SEQ ID NO: 72 - DNA, 1912 bp, Homo sapiens
gatgtttgggtgcccgccccgcccgcctcgcccgccgtgagcgcccggagcggtccgcgagccaccgaggcccagctcagtgtggaggctgctggccctgccatctgtaagaagatgtcatacggatccatcgcccgtggaggtggcctggggagccgtggccctctcgggggaccttcgagacaaggctgtcagcccctagagtgcgctagatgttggaccgagtatggaatccgccatttcccctgcccgtcgccagagagcaagctgcagaacccctgtgtggggaaggacggggaaggtgatctggggccagcaggcacgcctattgtcccaagggccaggaagcgagggcctggggttgcccctgaaggcagccggatgccggagcccacctcatcacccaccattggcccgaggaaggactcggctgctgggccccatggccggatggcggggcccagcgctacccgggccaagaagaggaagcccaacttctgcccgcaggagaccgaggtgctggtgtccaaggtgagcaagcaccaccagctgctgtttggcacggggctgctgaaggccgagcccactcgcaggtaccgcgtgtggagccgcatcctgcaggccgtgaatgcgctgggctactgtcgccgcgacgttgtggacctgaagcacaagtggcgggacctacgagccgtcgtgcggcgcaagctgggcgacctccggaaggcggcccatggccccagccctggttccggcaagccccaggccctggctctcacgcccgtggagcaggtggtggccaagaccttctcttgccaggccctgccctccgagggcttcagtctggagccgcccagagccacccaggtcgatccgtgcaacctccaggagctgttccaggagatgtcggccaacgtcttccgaatcaactccagtgtgacctccttggagcggagccttcagtccttagggacaccgagtgacacgcaggagcttcgggacagcctgcacacggcacagcaggagaccaacaagaccattgcagccagcgccagctccgtgaagcagatggccgagctgctgcgcagctcctgcccgcaggagcgtctgcagcaggagcgtcctcagctggaccggctgaaaacccagctctcagatgccattcagtgctatggagtggtgcagaagaaaattgcagaaaagtccagagcgctgcttcccatggcgcagaggggcagtaaacagagtccccaggccccgtttgccgagctggctgatgatgagaaggtctttaacgggagtgacaacatgtggcagggccaggagcaggcgctgctcccggacatcactgaagaggacctggaggccatccggctgcgggaggaggccatcctgcagatggagagcaacttgctggatgtgaatcagatcatcaaggacttggcctccatggtgtcagagcaaggagaagctgttgatagtattgaagccagccttgaggctgcgtcctcgcatgcggaggcagcccgccagctcctggctggagccagccggcaccaactccagagacacaagatcaagtgctgcttcctatcagctggagtcactgccctgcttgtcatcatcatcatcatcgccacctctgtccgaaagtgatgctacccgtgcatcggccgctgaaccgtcagctggctgtggtgtgggctctccagccccgagcacccctcctggcccggagctgggagctgatggagtccgctgcgttgtcagctgatgccgtcacctggcctgcaatggacccgagagcttcacagctgcctgctgtcctcccctgcactgaccccactcgcccctgtgtcggccccagctgagcacccgaataaaccgctgtggcttatccaaaaaaaaaaag

SEQ ID NO: 73 - DNA, 2307 bp, Homo sapiens
cgcgactagggtgcagcgccaggtccggtgttggggtgtccgagttgccgccggagaggagtggcctcgcccgcttgagttttgattcatcatggataatctgtcatcagaagaaattcaacagagagctcaccagattactgatgagtctctggaaagtacgaggagaatcctgggtttagccattgagtctcaggatgcaggaatcaagaccatcactatgctggatgaacaaaaggaacaactaaaccgcatagaagaaggcttggaccaaataaataaggacatgagagagacagagaagactttaacagaactcaacaaatgctgtggcctttgtgtctgcccatgtaatagaacaaagaactttgagtctggcaaggcttataagacaacatggggagatggtggagaaaactcaccttgcaatgtagtatctaaacagccaggcccggtgacaaatggtcagcttcagcaaccaacaacgggagcagccagtggtggatacattaaacgcataactaatgatgccagagaagatgaaatggaagagaacctgactcaagtgggcagtatcctgggaaatctaaaagacatggccctgaacataggcaatgagattgatgctcaaaatccacaaataaaacgaatcacagacaaggctgacaccaacagagatcgtattgatattgccaatgccagagcaaagaaactcattgacagctaaagctactgctgttcttctttatcatttattcacttccgtagctcctccttgaaagttattaccttttcagagtttaagttttcggttccacgctcttctaattgggagataatatggaagaagggccagagcagttacagccctccttcttttttgttttctgttgagggccgactgctgctctgccttccttctagtattttctttctcaattcatacgcttagattggttttcatatgtcatgtttagtgttttcatcctcctcatatacttcagcaggttcttttgctttcaagatttggaagcattgccaaagacagccatgaagaaggaagctgtagaggtgttttttgttgttgtttatttttgcttttgtggttgagggaaggacaagagataagaggttgttacctcagtaaaaaccttcaggccacaaagcaaaaagttgcatagccacaacgaagatctagttggatatagtttttgatttaagttgcagttatagccaatttaggctaatgcttggttttggagcttttatacacaacgtttttgttaggcatcacagttttgcaacctctgctccaaagagaaaaatagaatgagttttctttcttttttttttttttggagtcagagtctcgctctcttgtccaggctggagtgcaatagcgcgatctgggctcactgcaacctccgcctccctggttcaagcaattctcctgccttgcctcctgagtagctgggattacaggcgtgtgtcaccacgctcggctaatttttgtatttttagtagagacagggtttcaccatgtcaagctggtcttggactcctgacgtcgtgatccacccgccttggcctcccaaagtactgggattacaggcgtgagccactgtgcctggctgagttttcttaaagtgagcttaatttctgaactcttagtgattcatatatgtacataaatctgtgatcccatttcttattgcaccattcaggaacactttatataaatgagtggctttttatttcatattattagtagtatcatggttccattacaggcctattaacatcatacattgtcattagtctttgaagaaaaaatatgtaaatatatatgtgtaacatgagaatttctctctaaagcagggcttaaaattttttggaaaagtttgacaaagcataccacatgaattcagatttacctcaatgctaagaattatgtttagttaggaaaaaggaaagtcattttgacctcaggtagaaaaatagattgctttgagttttatgtagctttagactttaaaaagttagaatttattctgtaactaaaaattatttgaaaaaattatgcctctggtttaattattggtgattacacactctttctcttacccttgtgtattgaactatgtccataatcaagttgatgtggatcctgaaaagtgttatgaacatctgattggtatttgtcacatttattttaaaattagcatctgaacacttcaaagctgtcagtgtgtattggtttcaccaataaccactgcttgatccttacaattaaattttttaactaac

SEQ ID NO: 74 - DNA, 2920 bp, Homo sapiens
actctatgtctcctctcgttggattgtgacaccgggaggtcagggaactccaggaccttgttctctgctggattcgcagcaaccagcacagcacgtagggcgtagttggtgctggatggatgtttgttgaatgaatgaatgatgaatggctggcaccttgtctgctcatccctaactcctgttccttcatctgtgcagccctaatctttgtttcctcatctgtccatccctttatttgtgcatcctcattcttagccccttcactgcccttctccatctcttcctccttgttcatttgtccctgttctctgtcctctactccactcatgcccatctctgtccccttgacttacccagtccctgctactatctccatccctaatttctgccctcttgtctgtctactcctaattccttttccttgtccatccctaatacctgtcaccttgtccttcttcctcgaatctccatccctaatccatctgcccctaatctctgtcccctttgcccatccttccttttctcggtgtctctttccacccttatctccacacctgcccaccctgcactcccattctgtttcccatctgcacccttgccccatccctcccacacacaggaccagacggccaccatgtcaggagactacgaggatgacctctgccggcgggcactcatcctggtctcggacctctgtgcgcgggtccgagatgctgacaccaacgacaggtgccaggagttcaatgaccgaatccgaggctatccccggggtccagatgcagacatctccgtgagcctgctgtcggtcatcgtgacattctgtggcattgtccttctgggtgtctctctcttcgtgtcctggaagttgtgctgggtgccctggcgggacaagggaggctcggcagtgggcggtggccccctgcgcaaagacctaggccctggtgtcgggctggcaggcctggtaggcggaggcgggcaccacctggcggctggcctgggtggccatcctctgctgggcggcccacaccaccatgcccatgccgcccaccatccaccctttgctgagctgctggagccaggcagcctggggggttctgacacccctgagccctcctacttggacatggactcgtatccagaggctgcagcagcagcagtggccgctggggtcaaaccgagccaaacatcccctgagctgccctctgaggggggagcaggctctgggttgctcctgctgccccccagtggtgggggcttgcccagtgcccagtcacatcagcaggtcacaagcctggcacccactaccaggtacccagccctgccccgacccctcacccagcagactctgacctcccagccggaccccagcagtgaggagcgcccacctgccctgcccttacccctgcctggaggcgaggaaaaagccaaactcattgggcagattaagccagagctgtaccaggggactggccctggtggccggcggagcggtgggggcccaggctctggagaggcaggcacaggggcaccctgtggccgtatcagcttcgccctgcggtacctctatggctcggaccagctggtggtgaggatcctgcaggccctggacctccctgccaaggactccaacggcttctcagacccctacgtcaagatctacctgctgcctgaccgcaagaaaaagtttcagaccaaggtgcacaggaagaccctgaaccccgtcttcaatgagacgtttcaattctcggtgcccctggccgagctggcccaacgcaaactgcacttcagcgtctatgactttgaccgcttctcgcggcacgacctcatcggccaggtggtgctggacaacctcctggagctggccgagcagccccctgaccgcccgctctggagggacatcgtggagggcggctcggaaaaagcagatcttggggagctcaacttctcactctgctacctccccacggccgggcgcctcaccgtgaccatcatcaaagcctctaacctcaaagcgatggacctcactggcttctcagacccctacgtgaaggcctccctgatcagcgaggggcggcgtctgaagaagcggaaaacctccatcaagaagaacacgctgaaccccacctataatgaggcgctggtgttcgacgtggcccccgagagcgtggagaacgtggggctcagcatcgccgtggtggactacgactgcatcgggcacaacgaggtgatcggcgtgtgccgtgtgggccccgacgctgccgacccgcacggccgcgagcactgggcagagatgctggccaatccccgcaagcccgtggagcactggcatcagctagtggaggaaaagactgtgaccagcttcacaaaaggcagcaaaggactatcagagaaagagaactccgagtgaggggtctggcctaggcccgggatcggaccaggctccctcaggaccccatcctttcctgcccggaccgtgaattcatctccttgaagccataacgtccgagctgctggtgcggggcagccctggccctaggcttcctaaccctggaagcgagaggatgagaggaggccggcccagctccttctttcagggtgggggtcattcagcctccactgtgtctgtcttttcttccctggggctccccctcgaggcgaggggccatgcatgtctgggggacccctgccccccaaaaccctctgtctgtctctgtctctttgctgtttgtccaagactcagtgtcccgacccttgttctcgccgtgaatgtcaatgggccaatcctctctgtcctttcagacacacacacacctgtgtccaccccttctgttcgccacaccctgcgtctggccggtccccccactgctgctgctatcaacgccagaataaacacactctgtgggtctcactccaaaaaaaa

SEQ ID NO: 75 - DNA, 1280 bp, Homo sapiens
ccctttcgctgcggcctttccccaacccggacccggcacttctcgggttccgcgactgccgatcgccccggcgcggcaccgctccctcaggagtcgcctaggccgcgcagtctcccgacttctcgtcaggctttcgcgccggcgctccagcaatcactggctggagaaggtgggcgttccggctcgagaggaccctgccgcggctccggaagagcctcgtcctgggcggcggtggtgcggcggtcgccgttatggccactgggctgggcggctgaccgcgggctaggaaagggcccagggcccgaatctcggtggccgctgctccagcgcggcctgcgccatggcctcctccgccgcctcctcggagcatttcgagaagctgcacgagatcttccgcggcctccatgaagacctacaaggggtgcccgagcggctgctggggacggcggggaccgaagaaaagaagaaattgatcagggattttgatgaaaagcaacaggaagcaaatgaaacgctggcagagatggaggaggagctacgttatgcacccctgtctttccgaaaccccatgatgtctaagcttcgaaactaccggaaggaccttgctaaactccatcgggaggtgagaagcacacctttgacagccacacctggaggccgaggagacatgaaatatggcatatatgctgtagagaatgagcatatgaatcggctacagtctcaaagggcaatgcttctgcagggcactgaaagcctgaaccgggccacccaaagtattgaacgttctcatcggattgccacagagactgaccagattggctcagaaatcatagaagagctgggggaacaacgagaccagttagaacgtaccaagagtagactggtaaacacaagtgaaaacttgagcaaaagtcggaagattctccgttcaatgtccagaaaagtgacaaccaacaagctgctgctttccattatcatcttactggagctcgccatcctgggaggcctggtttactacaaattctttcgcagccattgaacttctatagggaagggtttgtggaccagaactttgaccttgtgaatgcatgatgttagggatgtggatagaataagcatattgctgctgtgggctgacagttcaaggatgcactgtatagccaggctgtgggaggagggaggaaagatgaaaaaccacttaaatgtgaaggaacaacagcaacaagaccagtatgatataccaaggtaataaatgctgtttatgacttctttaaaaaaaa

SEQ ID NO: 76 - DNA, 970 bp, Homo sapiens
ctgattatagttctgaggccctagctactcactttgcaaactccaggctccggtcgcgcacgggacgaactgcggggagtgagccgcgcgggccgccgtagtcagctgctaagagcaggaagagtccgagcggcgggcggagtctgcaggatggcaccggacccctggttctccacatacgattctacttgtcaaattgcccaagaaattgctgagaaaattcaacaacgaaatcaatatgaacgaaaaggtgaaaaggcaccaaagcttaccgtgacaatcagagctttgttgcagaacctgaaggaaaagatcgcccttttgaaggacttattgctaagagctgtgtcaacacatcagataacacagcttgaaggggaccgaagacagaacctcttggatgatcttgtaactcgagagagactacttctggcatcctttaagaatgagggtgccgaaccagatctaatcaggtccagcctgatgagtgaagaggctaagcgaggagcacccaacccttggctctttgaggagccagaggagaccagaggcttgggttttgatgaaatccggcaacagcagcagaaaattatccaagaacaggatgcaggccttgatgccctttcctctatcataagtcgccaaaaacaaatggggcaggaaattgggaatgaattggatgaacaaaatgagataattgacgaccttgccaacctagtggagaacacagatgaaaaacttcgcaatgaaaccaggcgggtaaacatggtggacagaaagtcagcctcttgtgggatgatcatggtgattttactgctgcttgtggctatcgtggttgttgcagtctggccgaccaactgatggcagtaaagagaccaccagcagtgacacctggcaatgacagatgcaagcccaacacccttttggtacgcaaaacctgctctcaataaattcccccaaagctctgaaa

SEQ ID NO: 77 - DNA, 1709 bp, Homo sapiens
gacccggagcagcagcagaggcaggaggactaggaggaggaggaggagccgtcgcaggatgaaggatcggactcaagagctgcggagtgcgaaagacagtgatgatgaagaggaggtggtccacgtggatcgggaccacttcatggatgagttctttgaacaggtggaagagatccggggctgcattgagaaactgtcggaggatgtggagcaggtgaaaaaacagcatagcgccatcctggccgcacccaacccagatgagaagaccaaacaggagctggaggatctcactgcagacatcaagaagacggccaacaaggttcggtccaaattgaaagcgatcgagcaaagcattgaacaggaggaggggctgaaccgttcctccgcggacctgcgcatccgcaagacccagcactccacactgtcccggaagttcgtggaggtaatgaccgaatataacgcgacccagtccaagtaccgggaccgctgcaaggaccggatccagcggcaactggagatcactggaaggaccaccaccaacgaagaactggaagacatgctggagagcgggaagctggccatcttcacagatgacatcaaaatggactcacagatgacgaagcaggcgctgaatgagattgagacgaggcacaatgagatcatcaagctggagaccagcatccgcgagctgcacgatatgtttgtggacatggccatgctcgtagagagccagggagagatgattgaccgcatcgagtacaacgtggaacattctgtggactacgtggagcgagctgtgtctgacaccaagaaagcagtgaaatatcagagcaaggcccggaggaagaaaatcatgatcatcatttgctgtgtggtgctgggggtggtcttggcgtcatccattggggggacgctgggcttgtaggccccccccacccttctctctcccagacccttcccccaccacatcgggagcaatacccccaccacccctttcactccatcccctgctccaggctcactcccaaaacagacccaggcagccccacccctcctccacccccacggcagaccctggtgtccctggacctcaccgggccatggacccccccccgtccccgcacgtagatcgcagcaggcgtgattacacatgcacaccaacatgcatgccgccggcacatgctcgagacgtgtggacaccccagcgtgcgtgtgcgtgtgatgtgtgtgatgcaccagagcaccccctccacccccaccttgggtgtgtgtgcgtggtctgagcttcccccttcaccggggctgttgtgtagactgcagccaagtgtaacacagcagtccatcacgccctctctgtcctctgtgaacagtgtgtgtgcgtgcgtgagaccacagatctgtggacacaccatttgtgtacgtggaattttgtgtttcagtgtttgaacctaatgcaacagcaacaaagccactgatacctgagccctttgtgtctgctacaaaccaggcaggtggtgtgtgtggactcacactcacattctcagaggatccagggaggcccaggtacacacaggccatggcagacaccccatgtctttgttaccccaggggctgtggcatgtcccaggagggtgtgcatgtgtgtgtgtgtgtgtgtgtgtgtgtccaggatgtgcctgaagtattgataggtcttctcagatagagcc

SEQ ID NO: 78 - DNA, 850 bp, Homo sapiens
gggcgataatggcggcgtcgaggctggagctaaacctggtgcggctgctatcccgctgcgaggcgatggcagcggagaaacgggacccggacgagtggcgcctggagaagtacgtgggagccctagaggacatgttgcaggccctgaaggtccacgcgagcaaaccggcctctgaggtgatcaatgaatattcctggaaggtggattttctgaaggggatgctgcaagccgagaagctgacctcctcctcagagaaagcactggccaaccagttcctggcccctggccgtgtgccaaccacagccagagagcgagtgcccgccacaaagacggtgcatctgcagtcacgggcgcggtacaccagcgagatgcggagtgagctactaggcacggactctgcagagcctgagatggacgtaaggaagagaactggagtggcagggtcccagccagtgagtgagaagcagtcggcagctgagctagacctcgtcctgcagcgacatcagaacctccaggaaaagctggcggaagagatgctaggactggcccggagcctcaagaccaataccctggccgcccagagtgtcatcaagaaggacaaccagaccctgtcacactcactgaaaatggcggaccagaacctggagaaactgaagacggagtcagagcgtctggagcagcacacgcagaagtcagtcaactggctgctctgggccatgctcattatcgtctgcttcatcttcattagcatgatcctcttcattcgaatcatgcctaaactcaaataaagacccccgcccacctaaaaaaaaaaaaaaaaaaaaaaaaaaaaaaaaaaaaaaaagaaaaa

SEQ ID NO: 79 - DNA, 1410 bp, Homo sapiens
gatcggactcaagagctgcggagtgcgaaagacagtgatgatgaagaggaggtggtccacgtggatcgggaccacttcatggatgagttctttgaacaggtggaagagatccggggctgcattgagaaactgtcggaggatgtggagcaggtgaaaaaacagcatagcgccatcctggccgcacccaacccagatgagaagaccaaacaggagctggaggatctcactgcagacatcaagaagacggccaacaaggttcggtccaaattgaaagcgatcgagcaaagcattgaacaggaggaggggctgaaccgttcctccgcggacctgcgcatccgcaagacccagcactccacactgtcccggaagttcgtggaggtaatgaccgaatataacgcgacccagtccaagtaccgggaccgctgcaaggaccggatccagcggcaactggagatcactggaaggaccaccaccaacgaagaactggaagacatgctggagagcgggaagctggccatcttcacagatgacatcaaaatggactcacagatgacgaagcaggcgctgaatgagattgagacgaggcacaatgagatcatcaagctggagaccagcatccgcgagctgcacgatatgtttgtggacatggccatgctcgtagagagccagggagagatgattgaccgcatcgagtacaacgtggaacattctgtggactacgtggagcgagctgtgtctgacaccaagaaagcagtgaaatatcagagcaaggcccggaggaagaaaatcatgatcatcatttgctgtgtggtgctgggggtggtcttggcgtcgtccattggggggacgctgggcttgtaggccccccccacccttctctctcccagacccttcccccaccacatcgggagcaatacccccaccacccctttcactccatcccctgctccaggctcactcccaaaacagacccaggcagccccacccctcctccacccccacggcagaccctggtgtccctggacctcaccgggccatggacccccccccgtccccgcacgtagatcgcagcaggcgtgattacacatgcacaccaacatgcatgccgccggcacatgctcgagacgtgtggacaccccagcgtgcgtgtgcgtgtgatgtgtgtgatgcaccagagcaccccctccacccccaccttgggtgtgtgtgcgtggtctgagcttcccccttcaccggggctgttgtgtagactgcagccaagtgtaacacagcagtccatcacgccctctctgtcctctgtgaacagtgtgtgtgcgtgcgtgagaccacagatctgtggacacaccatttgtgtacgtggaattttgtgtttcagtgtttgaacctaatgcaacagcaacaaagccactg

SEQ ID NO: 80 - DNA, 1730 bp, Homo sapiens
ccgttctgctctcgggggcaccttccggggttcctaagccgcggggcccctcgctgcccctcgaggccctttccctgacctaggctttggcctgggctactcgttccggagccgccatgtcgtccgacttcgaaggttacgagcaggacttcgcggtgctcactgcagagatcaccagcaagattgcgagggtcccacgactcccgcctgatgaaaagaaacagatggttgcaaatgtggagaaacagcttgaagaagcgaaagaactgcttgaacagatggatttggaagtccgagagataccaccccaaagtcgagggatgtacagcaacagaatgagaagctacaaacaagaaatgggaaaactcgaaacagattttaaaaggtcacggatcgcctacagtgacgaagtacggaatgagctcctgggggatgatgggaattcctcagagaaccagagggcacatctgctcgataacacagagaggctggaaaggtcatctcggagactagaggctggataccaaatagcagtggaaaccgagcaaattggtcaggagatgttggaaaaccttagtcatgacagagaaaagatacagcgagcacgtgaaagacttcgggaaacagatgctaatttgggaaaaagctccaggattctgacagggatgttgcgaaggggttgttctgtgaaaaaacaatgtaacctgtctctggccccaaaggcttgaaccagaaccagccagtggaaattactcaaacacgtattgtgccttcaatgagaagccttctcactgaaagagctgccctggacggaaaatgagtagtgagatgatgctggtggaagtatttatagatgcgcagtgcatgagtacttggcaaggatgctatcaaaggggaaactgacatcaaatgtgctgtggttctgggtgatttatctggtcccttcccatcccagagctttatgattctgtaataatcaagggagaaacccattacatagtggacaattttttttctttttttttctttttctttttttttttgagacagagtcttgccctgtcgcctggctggagtggagtggcacaatcttggctcactgcaacctccacctcccaggtccaagcgattctcttgcctcagcctcccaagtagctgggactacaggcacacaccaccacgcccagctaatttttgtatttcttttttttttttttgtagagatggagtttcaccatgttggccaggatggtctcgatctcttaaccttgtgagccaccgtgcccaaccctaacaattatttttaaaaggaggaatttaaatgagctgtggattattcattttgtcccataagaagataattaaaaaatgacaaaaatgaactgaacaaaaaagttctaacaaaataataaggctgaatttttaaagtctcttccgcatcttctgttccctgggatgccttagacggggtgtgcagtattttaggtacatcgtgagcaaggagcctgcattcccagggggcggcagggacagcatgtaaggtcttagtccagctctgtgatctgaaggcaaagcctctatgtgtgaaacacaggggtacctcaaaaatagaacaagagcactccatccatgtgcggatgactgtcaaggtcactgagacctacagtgatctggaaaattaaagctctctggccgcctttcctctcaggacatacttctggagatcaaaa

SEQ ID NO: 81 - DNA, 1830 bp, Homo sapiens
gcccaccgaccggcctcgagcgccccggcgggaggtttttctatatgagtggagaagacagctgttaccagggaggtcatacaacatttttttaggatgtctgaagatgaagaaaaagtgaaattacgccgtcttgaaccagctatccagaaattcattaagatagtaatcccaacagacctggaaaggttaagaaagcaccagataaatattgagaagtatcaaaggtgcggaatctgggacaagttgcatgaagagcatatcaatgcaggacgtacagttcagcaactccgatccaatatccgagaaattgagaaactttgtttgaaagtccgaaaggatgacctagtacttctgaagagaatgatagatcctgttaaagaagaagcatcagcagcaacagcagaatttctccaactccatttggaatctgtagaagaacttaagaagcaatttaatgatgaagaaactttgctacagcctcctttgaccagatccatgactgttggtggagcatttcatactactgaagctgaagctagttctcagagtttgactcagatatatgccttacctgaaattcctcaagatcaaaatgctgcagaatcgtgggaaaccttagaagcggacttaattgaacttagccaactggtcactgacttctctctcctagtgaattctcagcaggagaagattgacagcattgcagaccatgtcaacagtgctgctgtgaatgttgaagagggaaccaaaaacttagggaaggctgcaaaatacaagctggcagctctgcctgtggcaggtgcactcatcgggggaatggtagggggtcctattggcctccttgcaggcttcaaagtggcaggaattgcagctgcacttggtggtggggtgttgggcttcacaggtggaaaattgatacaaagaaagaaacagaaaatgatggagaagctcacttccagctgtccagatcttcccagccaaactgacaagaaatgcagttaaaaaccaaatttcagtattattggtgccaacatgtctatcctgaggacctttgctgctgttggacactccgtcaccttttggaacacaagtatatcaagatagtggctactgatgttcaagtgggattgaagtgtgataaatggatatattttgttgtttgctggggtgttcatggagatgttaagagattgaggccctgggctgagggtatataatgtatgtcaggtaaagtttgaagactgccaaggagcagattttctccctggaaatgtgaaaactgaacctataactctgataaggacttgagatgtgtagaaacgttgggttatggaagactagtttcttccataaccctgaattggagaccttaatgctaagtgtagattattgaggtttgttagtgaggaaaagaataagagttcagaagcctttgttatcagatagcgaaatcagggcctagtgaggagcacaggtcgactacataatggagtccattggcgaaccctattgcaatttggtccaactatatcttctggtgaaggaaattaatgatgtaagaaaatgcaagaggctcaacttctcttccaaaaatcttctggcttctgaactcttcctctgcctctctttaaataaataacacagaatttcaagtggtaggagacttattaagccagtcaccaagcttggtctgtcagcctgtcttctaacacctcaaagatcttgtgccctgtgctgtccctcccttgtaattatgaaaagttctttggtttctggggtgaattctacccatgtataatgaggaattctctcataaccttaaaaaaa

SEQ ID NO: 82 - DNA, 3330 bp, Homo sapiens
gcggagcgcgcggggcgcggttgccgtggcagcgccggctccagggagggctgctggcgccgggccgggaccgcggggcctgaggcggagaccggagagcccgcggcccggccggaggcagctcgggacaggcttgagcggcggggcgcgctgcccggccggcggggatgcgggaccggctgccagacctgacggcgtgtaggaagaatgatgatggagacacagttgttgtggttgagaaagatcatttcatggatgatttcttccatcaggtggaggagattagaaacagtattgataaaataactcaatatgttgaagaagtaaagaaaaaccacagcatcattctttctgcaccaaacccggaaggaaaaataaaagaagagcttgaagatctgaacaaagaaatcaagaaaactgcgaataaaattcgagccaagttaaaggctattgaacaaagttttgatcaggatgagagtgggaaccggacttcagtggatcttcggatacgaagaacccagcattcggtgctgtctcggaagtttgtggaagccatggcggagtacaatgaggcacagactctgtttcgggagcggagcaaaggccgcatccagcgccagctggagataactgggagaaccaccacagacgacgagctagaagagatgctggagagcgggaagccatccatcttcacttccgacattatatcagattcacaaattactagacaagctctcaatgaaatcgagtcacgtcacaaggacatcatgaagctggagaccagcatccgagagttgcatgagatgttcatggacatggctatgtttgtggagactcagggtgaaatgatcaacaacatagaaagaaatgttatgaatgccacagactatgtagaacacgctaaagaagaaacaaaaaaagctatcaaatatcagagcaaggcaagaaggaaattgatgttcattattatttgtgtaattgttttgcttgtgatccttggaattatcctagcaacaacattgtcatagcaaccatatcccaagagccatttatccttgagactcagaccacatctgcaaccaaatcagcatcctgtcatttcgtgaatgaatctcagacgctgtaacccggcatcgagtgctgaccttgtaatgtatgagttcacggaagaagcacaaccgaacgtcttgttcagtgacagcgccgtaagcacagtgggtgtgatgcgtgaccctgaatgacacactacagaatgtgagcagtgtgagacttctctcactggccttgaaataagaaaatattgaacattttaatattaaaaatatttcagtgttaacaaatgtgcatgaagtttaattaggaaggaatgctttatgttatgaaggctttttttttttttttttgagacggagtctcgctttgtcatccaggctggagtgcagtggtgcgatctcagctcactgcaacctcagcctcccgggttcaagcaattctcctgcctcagcctcccgagtagctgggattacaggcatgggccaccacacccagctaattttttgtgttttctttttagtagagacggggttttaccatgctggccaggctggcctcaaactcctgaccttgtgatccacccacctcagcctcccaaagtgctgggattacaggcgtgagtcaccgggcaggctgttctgaagcttttagatctcaggtctaaggcttcctttccctccctctcccagctagtttgtgctaattaagagaccttttatactgttttattgcctgtttgaagaaataatttttatcacgtttttgtaagatatctataattttaaatgtttataaattgtttaatttattagcatcttaatgtaccccatttttatatactgaatgtggccttttgagtgaaataggaagcttcatggtgttggagccacctttgtacagttgtttaaagtttcccattgtcacggaaaacattggctgcaaagcccctcaaagccctcaagtgccttctgtgagtttaaatgtgctggtgccctccagaaaagcctcggcctcagctccgtttccgcctgttccctcccccaggataatgaatggttactgcactgtaaagaccgtggtctcttttcactaaataggagattcgagtttcccagtttacatgaatgaagtctgaatttaagacggtgatgaaactgaggttcagtactctcgggactcgaggaaattattcctgagacatggagtaattcttacaaatttaaactattgtacagatccacatacatgttgttaagtacctaatgttttgctgaacttttaaaagttaatttccaaaatgtatagggattcatgataattaaacctttttattgctcatttttttagtagaagaatatcacttatttttagacttgtaaaatgtatgaactggtgagcggacatctgttaagagagtcactagtcagaatgttaaaggagtgcatgcaggatgccccaaatgtcgtgaactcttgttactcctgtatgtagtagtgtaagcatgtgacttttaacaccatttggtttgaaactaatgtagagatgcctgattccaaacaggtgtggagaatattgaacggctcagaagccgcgtcccttacttaacacaattccgaatctccctcatccatgatgcgtccattggatcactcgctggtggtcactgtgtggcagttactaggggaattctgcctctgactgttctttttcttttggtctttaaacaccctgtcgtgggatgtgctcactgatttgtggctatgttgaaggtatcacttgtcttgagggttttcaatatttcaggatcatgctggtggcaaaaggactccacgcctctgtggaatcatgtccacagggggacctgcctcccgtgatgtcccacctttccttcaaggtctgtcatatgagtcctccccttttacaacacttattatggtatttttcaagttattcttcttagatttgcagtacctactgaaatttgtgtttttatagttgaagttaggaaaatgctatttgatttgtatttagatatttaagtcacttgtccaatgatgtgtatgtctaagcctcatgtaccgatttgaagtcagacttaaaaatgtatttacagattcacttgagactttttaatcggttcttcaaatatttcatgtttacattaaaaatttccagagaagcataaaagtattcactttcctgccttgtcatttctggaaagattttggggagatattttattgcatattaattaataaattgttctactaggaa

SEQ ID NO: 83 - DNA, 1390 bp, Homo sapiens; identical to SEQ ID NO: 70

SEQ ID NO: 84 - DNA, 2140 bp, Homo sapiens
gtgacgcgccctcctcgcggtgcccttcagccgccgccgcagctcaccgggcgccacatggacccagccggcccgagcgcgccccgccgctgaccgcccgcgccccgggaaggaagaacactcgctcccggccatacttgcgtgtgagttctgacccctggaggagccactgtggaagcagagcaatcgccatggagtttgtgatgaagcaggctctaggaggggccaccaaggacatggggaagatgctggggggtgacgaggagaaggacccagacgccgccaagaaggaggaggagcggcaggaggcgctgcgccaggcggaggaggagcgcaaggccaagtacgccaagatggaggcggagcgcgaggccgtgcgccagggcatccgagacaagtacggcatcaagaagaaggaggagcgcgaggccgaggcccaggccgccatggaggccaactccgaggggagcttgacgcggcccaagaaggccatcccgccgggctgcggggacgaggtggaggaggaggacgagagcatcctggacaccgtcatcaagtacctgcccgggccgctgcaggacatgctcaagaagtagccccgcgcgggacagcggccccgcggagcccccgcccctccccctacagatcctccgcggaggcccctgagggacgagcagagcgcagcccccacgccgatataagccatagccccaggcccgccctgcccgcgcccgccgcctccctcacccggcaaggggcgcgcgcccccaggacccccccagtccgccccgtgctcctctgcccgcgggtggctggagccccatcgcctgggacgcccctttctcttgctgtttaccgcccacccagcagcgcccgaggccagggccgccgaagggcagccccgcgaccacccctgtgcgcgcgttcgcggcggtgggcgcctgtcgggcccgcactcaggagcacagccatagcagacgggggggtgcgggcggggcgagggcggcggggcctgggtccccctcctgcacgcggactccggggttcggatcgctccgccgtgagtatttgcgtccgcacgcggccgctctccgccccccggcctggccccctcgcgcccctgtccatccgtctctgtccgcgtcctttcctctcctctctggaaggttttgcttcttacgaacgccacggccgtgttcacttctaaactaaagaaaacaaagcaataggtttgggggacgcccagcccccacccccgtcaccccgctcttcccgagtcctcgccccccgcccggcctcctagcctctccgcccacgcggctgctgcttctccctggggaggacccctgccctcggccattgaacactgcaccctccacaggagccgcagaggcccgaggcaccggacgctggagaccctgcgcccctgcccagcacctcctccgtgggcagctcctcgggtggggcctgcggggttccctgcgcgcagccggcgcgtgtgtggcctaatccacctggtggccctgcggggcggcatccgagcccctgtttctcctccattcatgtttaatttgcatcacaatttgttgaatctcaggtaaatgaggtctttgcatttaatgagttttatcttgacaggcgccgcctcgcccccgggccctttcgtccacatcaaaaatgcatcaagtctccacgtgtttcgggccagggcgtggcttggcattgaccttcatgaccttacatagctttagagaagccataacgttagactgcaatactaacgaccgacgcccctccgggcagagacaaccgcgcccctctgcgccccagcgacgcggcccgcggggacgtcgctgtccgtcctgctcgccctgtgccctctcactgacttctcccgggtcgtgtcttttaaaaactcctgttttcacaccttacaaagccagctctgagcagacagggcgtcctctcgtagaacctgcgcaccccgttcccagcgcatggcgccccgggccgcgagcttagcttagaccgtggtgtcctctgtccgtctgtcctgcgcctgcgcctcctcctgcatgtcggggcccctgcgtgtgttctctccggatggaatcacagccaataaacaccagtgatttca

SEQ ID NO: 85 - DNA, 2940 bp, Homo sapiens; identical to SEQ ID NO: 53

SEQ ID NO: 86 - DNA, 2880 bp, Homo sapiens
gtcgacccacgcgtccggagcggtgtagagcgagcaggtctcagctcctcgtcatgtcatacggtcccttagacatgtaccggaacccggggccctcggggccccagctccgggacttcagcagcatcatccagacgtgcagcggcaacatccagcggatcagccaagccactgctcagataaagaatttgatgagccagctaggaactaagcaggactcaagcaagctacaggaaaatctgcaacagttacaacactccacaaatcagctcgccaaggaaacaaatgaattgctgaaagaattagggtccttgccccttcccttatctacttcagaacagcgccagcagagacttcagaaggaacgcctcatgaatgacttctctgcagccttaaacaatttccaggctgtgcagagaagggtatctgaaaaggaaaaggagagtattgccagagcaagagctggatctcgtctttctgcagaagagaggcaaagagaggagcagctggtctcatttgacagccatgaggagtggaaccagatgcagagccaggaggatgaggtggccatcactgagcaggatttggaacttattaaagaaagagaaacggcaattcggcagctggaggctgacattttggatgtcaatcagatatttaaagatttggccatgatgatccatgaccagggtgatctgattgatagcatagaagccaatgtggaaagctcagaggtgcacgtcgaaagagccactgaacagttacagcgagctgcttactatcagaaaaaatctcgcaagaagatgtgtatcctggtgcttgtcctgtcagtgattattctaatcttgggacttattatctggctagtttataaaacgaagtgattgcctccgatcgttctcccgctgagctgttttcaagggcaagtgcttgttgaagtcttgccagaacaaactgatcacaagaagacagcatatatcagaacgtcctgtaatcatttagttagaaactaactactaactagtctttggaattcgtgacctatggagacagtaattatcaatttattgattctattgatttctcaaattaggaattaacttatgtggattttgcttcctcttgtattctgattgcccttcatcccaagtgtttactgaaaattccattctagatattcttgttttgacaaatgacactacagtctcgtaatattgtcttttatgtatatacaaaatttacctttttactagcatctgagatagagttactttctggtacccagtatattggagtctgtcagaaactctataataggccaccagtttttattatttaacatttttatttgaatttctaagaagcctattctctatctattttgaaagattttggcactatatttaattggaaggtaaaatattgtacatgtgatccagagtaaatgagaagtctctatctgagctggtcagttactggagtacatgttactaatctgggtttaaagtttacttcattatctgctagtgtcatccacagcagttcatcctcatccacactaagccatcctgttagcttttaaaggaagttaatttaattaacattaatatactctatgggctccctctcccacctgtctgcatagaaaggcagaattagacatagcatgctttggaaaagcaaataggaattgttgggaatgatttaatcttgttgttgttgttgttgttgttcacttgtggttctacattcctggtgaatgatgaatgttgctgtcaaagggctgccccctaccttataagggttgctgggcatttgaaggcaggaagatttttaaagatagattgaggttggtttaaaattattcctgtaaaccaacaataaagcaaagaagaggttcatttttgtaaataacactggtttcaaatagtgatgttagacttaacctaatttataaacaagagattaatatctccatgcatagttttagacaaaaaaagatgtttcaataaaattactgtcttgtaatataaatgttgtccacttcccttttccacaggcctagaacagttaaagggaacataatttgtttaggctcccacataaatgtgaatctggccaacaactttggttcatcctttagtgaattagaggatttggctaccctgagtatatttatattcatttcttctgttctccttctgttattatacttaatcttctaaactaaactaatgtgaacagtagggaagcaagggcccaaatgcataagtttctttgcactgttgcacttacttaatacaaataaatgttttttaaagcttttgtagtatgtttttatgagttaacatcctaatgtggtaggtattaggtaatgtgctgtcatgagaaaaattgagacttccaagaaaactggacaccaggtgagggttggtttggagacggaataggtgtagctgcctttccttgaaaaacagtgtgtagagatggctgagtgcaatggctcacacttgtaatcccaacactttggaaggctgaggcgggaggatcagtatatcggtacgtctgagcccaagagttcaagatcagcctgggcagtatagcaagaccccatctccattttttttttaatgattttttaattaaaaaaaagaacaacaggatagagctgttggggtggcacagtggcccaaagagcagcttcagagataattccttggttctatgatccctgtttaactccaaattacagtcggacttggatacatcatttgtaacattgtaggaaagaaaaaagtcttggttgtgaaaaacgatttgcatttgggtaaaataaagtgaccatgcttttgttctgtaaaaaaaaaaaaaaaaaaaaaa

SEQ ID NO: 87 - DNA, 2590 bp, Homo sapiens
gacaaagatggcggcagggaccagcagttactgggaagatctcaggaaacaggctcgacagctggaaaatgaacttgacctgaaactagtttccttcagcaaactatgtacaagttacagtcatagcagtacccgagatggaagacgcgacaggtatagttctgatacaacaccccttttaaatggatcaagccaagacagaatgtttgagacaatggcgattgagattgaacaacttttggcaaggcttacaggggtaaatgataaaatggcagaatataccaacagtgcaggtgtcccctccttgaatgcagccctgatgcatacattacagcggcatagagacatattgcaggattatacacatgaattccataaaaccaaagcaaactttatggcaatacgggaaagggagaatcttatgggatcagtacgaaaagatattgagtcatataaaagtgggtctggagtaaacaacagaagaactgagctatttttgaaagaacatgaccaccttcgaaactcagatcgtctgatagaagagacaataagcattgctatggcaacaaaagaaaatatgacttcacagagaggaatgttgaagtcaattcacagcaaaatgaacactttggccaatcgttttcctgctgtaaacagcctgatccagaggatcaacctgaggaagcggcgggactcgctcatcctagggggtgttattgggatctgtaccatcctgttgctgctgtatgcgttccattgatgggacatcttcagggactcttgacagccaccgctttcacaccctggtctggaataaggaaacatcggagggagaagttgactgtcttgataattagcctgaccagcaggatgaatgcaagactgacagtgatggactctgtgacatggtcaggttgagctgaagccacagtttctctgtgctgtgttttctaacacatttttctgtttttaattaaaaaaaaaaaaaaaaggttttcagttgcttttgtctccctaggaggcaggtaaaccaatcaaaaacagagttttctgtgtttccatgatagtgttgaagcctaatgacaagccaggtcttacagctgggctcttcagaaaaccaggtttctacatccaaagactgcttttcttttagctgccagattggattgtgaataaaaataattcttccctctccctctccctctccccacggtctccctctttccacggtctccctctgatgccgagccgaagctggactgtactgctgccatctcggctcactgcaacctccctgcctgattctcctgcctcagcctgccgagtgcctgcaattgcaggcgagcgccgccacgcctgactgcctcggcctcccgaggtgccgggattgcagacggagtctcgttcactcagtgctcaatggtgcccaggctggagtgcagtggcgtgatctcggctcactacaacctccacctcccagccacctgccttggcctcccaaagtgccgagattgcagcctctgcccggccgccaccccgtctggaaagtgaggagcgcctctgcccggccgccatcccatctaggaagtgaggagcgcctcttcccagccgccatcccatctaggaagtgaggagcgtctctgcccggccgcccatcgtctgagatgtggggagcgcctctgccccgccgccccgtctgggatgtgaggagctcctctgcccggccgcgaccccgtctgggaggtgaggagcgtctctgtctggccaccccgtctgagaagtgaggagacctccgcccggcagccgccctgtctgagaagtgaggagcccctccgcccggcagccaccccatctgggaagtgaggagcgtctacgcccgggcagctgccccgtccgggagggaggtgggggggtcagccccccgcccggccagccgccccgtccgggagggaggtgggggggatcagccccccgcccggccagccgccccgtccgggagggaggtggggggcgcctctgcccggccgcccctgcccggccgcccctactgggaagtgaggagcccctctgcctggccaccaccccatctgggaggtgtgcccagcagctcattgagaacgggccatgatgacaatggcggttttgtggaatagaaaaggcggaaaggtggggaaaagattgagaaattggatggttgccgtgtctgtgtagaaagaagtagacatgggagacttttcattttgttctgtactaagaaaaattcttctgccttgggatcctgttgatctatgaccttacccccaacctggtgctctctgaaacatgtgctgtgtccactcagggttaaatggattaagggtggtgcaagatgtgctttgttaaacagatgcttgaaggcagcatgctccttaagagtcatcaccactccctaatctcaagtacccagggacacaaacactgcggaaggcggcagggtcctctgcctaggaaaaccagagacctttgttcacttgttgatctgctgaccttccctccactattgtcctatgaccctgccaaatccccctctgcgagaaacacccaaaaaaaa

SEQ ID NO: 88 - DNA, 1920 bp, Homo sapiens; identical to SEQ ID NO: 71

SEQ ID NO: 89 - DNA, 1160 bp, Homo sapiens; identical to SEQ ID NO: 63

SEQ ID NO: 90 - DNA, 2300 bp, Homo sapiens
gggggccaggtccggtgttggggtgtccgagttgccgccggagaggagtggcctcgcccgcttgagttttgattcatcatggataatctgtcatcagaagaaattcaacagagagctcaccagattactgatgagtctctggaaagtacgaggagaatcctgggtttagccattgagtctcaggatgcaggaatcaagaccatcactatgctggatgaacaaaaggaacaactaaaccgcatagaagaaggcttggaccaaataaataaggacatgagagagacagagaagactttaacagaactcaacaaatgctgtggcctttgtgtctgcccatgtaatagaacaaagaactttgagtctggcaaggcttataagacaacatggggagatggtggagaaaactcaccttgcaatgtagtatctaaacagccaggcccggtgacaaatggtcagcttcagcaaccaacaacgggagcagccagtggtggatacattaaacgcataactaatgatgccagagaagatgaaatggaagagaacctgactcaagtgggcagtatcctgggaaatctaaaagacatggccctgaacataggcaatgagattgatgctcaaaatccacaaataaaacgaatcacagacaaggctgacaccaacagagatcgtattgatattgccaatgccagagcaaagaaactcattgacagctaaagctactgctgttcttctttatcatttattcacttccgtagctcctccttgaaagttattaccttttcagagtttaagttttcggttccacgctcttctaattgggagataatatggaagaagggccagaagcagttacagccctccttcttttttgttttctgttgagggccgactgctgctctgccttccttctagtattttctttctcaattcatacgcttagattggttttcatatgtcatgtttagtgttttcatcctcctcatatacttcagcaggttcttttgctttcaagatttggaagcattgccaaagacagccatgaagaaggaagctgtagaggtgttttttgttgttgtttatttttgcttttgtggttgagggaaggacaagagataagaggttgttacctcagtaaaaaccttcaggccacaaagcaaaaagttgcatagccacaacgaagatctagttggatatagtttttgatttaagttgcagttatagccaatttaggctaatgcttggttttggagcttttatacacaacgtttttgttaggcatcacagttttgcaacctctgctccaaagagaaaaatagaatgagttttctttcttttttttttttttggagtcagagtctcgctctcttgtccaggctggagtgcaatagcgcgatctgggctcactgcaacctccgcctccctggttcaagcaattctcctgccttgcctcctgagtagctgggattacaggcgtgtgtcaccacgctcggctaatttttgtatttttagtagagacagggtttcaccatgtcaagctggtcttggactcctgacgtcgtgatccacccgccttggcctcccaaagtactgggattacaggcgtgagccactgtgcctggctgagttttcttaaagtgagcttaatttctgaactcttagtgattcatatatgtacataaatctgtgatcccatttcttattgcaccattcaggaacactttatataaatgagtggctttttatttcatattattagtagtatcatggttccattacaggcctattaacatcatacattgtcattagtctttgaagaaaaaatatgtaaatatatatgtgtaacatgagaatttctctctaaagcagggcttaaaattttttggaaaagtttgacaaagcataccacatgaattcagatttacctcaatgctaagaattatgtttagttaggaaaaaggaaagtcattttgacctcaggtagaaaaatagattgctttgagttttatgtagctttagactttaaaaagttagaatttattctgtaactaaaaattatttgaaaaaattatgcctctggtttaattattggtgattacacactctttctcttacccttgtgtattgaactatgtccataatcaagttgatgtggatcctgaaaagtgttatgaacatctgattggtatttgtcacatttattttaaaattagcatctgaacacttcaaagctgtcagtgtgtattggtttcaccaataaccactgcttgatccttacaattaaattttttaactagcaaaaa

SEQ ID NO: 91 - DNA, 930 bp, Homo sapiens
gcgaggccctggacggcggcggcagtggggctcctccttctgtttcccagactgagagccgcgccggcaccatgtcagcttaccctaagagctacaatccgttcgacgacgacggggaggacgaaggcgcccggccggccccttggagggacgcccgagacctccccgacgggcccgacgcgcccgcggacaggcagcagtacttgcggcaggaggtcctccgcagggctgaggccacggccgccagcaccagcaggtccctggccctcatgtacgagtccgagaaggttggggtcgcctcttccgaggagctcgcccgtcagcgaggagtcctggagcgcacagagaagatggtggacaagatggaccaagatttgaagatcagccagaaacacatcaatagcattaagagcgtgtttggggggctggtcaattacttcaaatccaaaccagtagagaccccacctgaacagaatggcaccctcacctcccagcccaacaacagattgaaagaagctataagtacaagtaaagaacaggaagcaaagtaccaggccagccacccaaaccttagaaagctggatgatacagaccctgtccccagaggggctggttctgccatgagtactgatgcttacccaaagaacccacaccttcgagcctatcaccagaagatcgacagcaacctagatgagctgtccatgggactgggtcgtctgaaggacatagccctggggatgcagacagaaattgaggagcaagatgacattcttgaccggctgacaaccaaagtggacaagttagatgtcaacataaaaagcacagaaagaaaagttcgacaactctgaagacagacggatttccactctattgtgatgaaaagatttgaaagatctttttttgaacttccaagaaatttcatttactatt

SEQ ID NO: 92 - DNA, 840 bp, Homo sapiens
gagcggcgggcggagtctgcaggatggcaccggacccctggttctccacatacgattctacttgtcaaattgcccaagaaattgctgagaaaattcaacaacgaaatcaatatgaacgaaaaggtgaaaaggcaccaaagcttaccgtgacaatcagagctttgttgcagaacctgaaggaaaagatcgcccttttgaaggacttattgctaagagctgtgtcaacacatcagataacacagcttgaaggggaccgaagacagaacctcttggatgatcttgtaactcgagagagactacttctggcatcctttaagaatgagggtgccgaaccagatctaatcaggtccagcctgatgagtgaagaggctaagcgaggagcacccaacccttggctctttgaggagccagaggagaccagaggcttgggttttgatgaaatccggcaacagcagcagaaaattatccaagaacaggatgcaggccttgatgccctttcctctatcataagtcgccaaaaacaaatggggcaggaaattgggaatgaattggatgaacaaaatgagataattgacgaccttgccaacctagtggagaacacagatgaaaaacttcgcaatgaaaccaggcgggtaaacatggtggacagaaagtcagcctcttgtgggatgatcatggtgattttactgctgcttgtggctatcgtggttgttgcagtctggccgaccaactgatggcagtaaagagaccaccagcagtgacacctgccaatgacagatgcaagcccaacacccttttggtacgcaaaacctgctctcaataaattcccccaaagctctg

SEQ ID NO: 93 - DNA, 1090 bp, Homo sapiens
ccggggtaggtgggtgacggcggtcggaggtgtaggagggagccgtggaggtccaggtgactgcttagaaaactgcacagcatctgatgaaattagcgaataagaacatcaaccatgtcttacactccaggagttggtggtgaccccgcccagttggcccagaggatctcttctaacatccagaagatcacacagtgttctgtggaaatacaaagaactctgaatcaacttggaacacctcaagattcacctgaattgaggcaacagttgcaacagaagcagcagtatactaaccagcttgccaaagaaacagataagtacattaaagagtttggatctctgcccaccacccccagtgaacagcgtcaaaggaaaatacagaaggatcgcttagtggcagagttcacaacatcactgacaaacttccagaaggtccagaggcaggctgctgagcgagagaaagagtttgttgctcgagtaagagccagttccagagtgtctggcagttttcctgaggacagctcaaaagaaaggaatcttgtatcctgggaaagccaaactcaacctcaagtgcaggtgcaggatgaagaaattacagaggatgacctccgtcttattcatgagagagaatcttctatcaggcaacttgaagctgatattatggatattaatgaaatatttaaagatttgggaatgatgattcatgaacaaggagatgtaatagatagcatagaagccaatgtggaaaatgcagaggtgcacgttcagcaagcaaatcagcagctgtcaagggcagcagattatcagcgcaaatccagaaaaaccctgtgcatcatcattcttatccttgtcattggagttgcgattatcagtctcatcatatggggattgaaccactgaagttataaaggagcacactgtcgcactacattgtctaaattatgtaggaagattcctgtaatcatgtttttttaattattattttaaagctattgtataaaggatggttcccatactttgttatttttattgggggggttggggtggttcctttggattaaatctgatattttctaatactgaaaaaaaa

SEQ ID NO: 94 - DNA, 1980 bp, Homo sapiens
tgctcggcggctccaccacagttgcaacctgcagaggcccggagaacacaaccctcccgagaagcccaggtccagagccaaacccgtcactgaccccccagcccaggcgcccagccactccccaccgctaccatggccgaagacgcagacatgcgcaatgagctggaggagatgcagcgaagggctgaccagttggctgatgagtcgctggaaagcacccgtcgtatgctgcaactggttgaagagagtaaagatgctggtatcaggactttggttatgttggatgaacaaggagaacaactcgatcgtgtcgaagaaggcatgaaccatatcaaccaagacatgaaggaggctgagaaaaatttaaaagatttagggaaatgctgtggccttttcatatgtccttgtaacaagcttaaatcaagtgatgcttacaaaaaagcctggggcaataatcaggacggagtggtggccagccagcctgctcgtgtagtggacgaacgggagcagatggccatcagtggcggcttcatccgcagggtaacaaatgatgcccgagaaaatgaaatggatgaaaacctagagcaggtgagcggcatcatcgggaacctccgtcacatggccctggatatgggcaatgagatcgatacacagaatcgccagatcgacaggatcatggagaaggctgattccaacaaaaccagaattgatgaggccaaccaacgtgcaacaaagatgctgggaagtggttaagtgtgcccacccgtgttctcctccaaatgctgtcgggcaagatagctccttcatgcttttctcatggtattatctagtaggtctgcacacataacacacatcagtccacccccattgtgaatgttgtcctgtgtcatctgtcagcttcccaacaatactttgtgtcttttgttctctcttggtctctttctttccaaaggttgtacatagtggtcatttggtggctctaactccttgatgtcctgagtttcatttttcattttctctcctcggtggcatttgctgaataacaacaatttaggaatgctcaatgtgctgttgattctttcaatccacagtattgttcttgtaaaactgtgacattccacagagttactgccacggtcctttgagtgtcaggctctgaatctctcaaaatgtgccgtctttggttcctcatggctgttatctgtctttatgatttcatgattagacaatgtggaattacataacaggcattgcactaaaagtgatgtgatttatgcatttatgcatgagaactaaatagatttttagattcctacttaaacaaaaactttccatgacagtagcatactgatgagacaacacacacacacacaaaacaacagcaacaacaacagaacaacaacaaagcatgctcagtattgagacactgtcaagattaagttataccagcaaaagtgcagtagtgtcacttttttcctgtcaatatatagagacttctaaatcataatcatccttttttaaaaaaaagaattttaaaaaagatggatttgacacactcaccatttaatcatttccagcaaaatatatgtttggctgaaattatgtcaaatggatgtaatatagggtttgtttgctgcttttgatggctacgttttggagagagcaatcttgctgtgaaacagtgtggatgtaaattttataaggctgactcttactaaccaccatttcccctgtggtttgttatcagtacaattctttgttgcttaatctagagctatgcacaccaaattgctgagatgtttagtagctgataaagaaaccttttaaaaaaataatataaatgaatgaaatataaactgtgagataaatatcattatagcatgtaatattaaattcctcctgtctcctctgtcagtttgtgaagtgattgacattttgtagctagtttaaaattattaaaaattatagactccaaaaaaa

SEQ ID NO: 95 - DNA, 1739 bp, Homo sapiens
ctcagtgtggaggctgctggccctgccatctgtaagaagatgtcatacggatccatcgcccgtggaggtggcctggggagccgtggccctttcgggggaccttcgagacaaggctgtcagcccctagagtgcgctagatgttggaccgagtatggaatccgccatttcccctgcccgtcgccagagagcaagctgcagaaccgctgtgtggggaaggacggggaaggtgatctggggccagcaggcacgcctattgtcccaagggccaggaagcgagggcctggggttgcccctgaaggcagccggatgccggagcccacctcatcacccaccattggcccgaggaaggactcggctgctgggccccatggccggatggcggggcccagcactacccgggccaagaagaggaagcccaacttctgcccgcaggagaccgaggtgctggtgtccaaggtgagcaagcaccaccagctgctgtttggcacggggctgctgaaggccgagcccactcgcaggtaccgcgtgtggagccgcatcctgcaggccgtgaatgcgctgggctactgtcgccgcgacgttgtggacctgaagcacaagtggcgggacctacgagccgtcgtgcggcgcaagctgggcgacctccggaaggcggcccatggccccagccctggttccggcaagccccaggccctggctctcacgcccgtggagcaggtggtggccaagaccttctcttgccaggccctgccctccgagggcttcagtctggagccgcccagagccacccaggtcgatccgtgcaacctccaggagctgttccaggagatgtcggccaacgtcttccgaatcaactccagtgtgacctccttggagcggagccttcagtccttagggacaccgagtgacacgcaggagcttcgggacagcctgcacacggcacagcaggagaccaacaagaccattgcagccagcgccagctccgtgaagcagatggccgagctgctgcgcagctcctgcccgcaggagcgtctgcagcaggagcgtcctcagctggaccggctgaaaacccagctctcagatgccattcagtgctatggagtggtgcagaagaaaattgcagaaaagtccagagcgctgcttcccatggcgcagaggggcagtaaacagagtccccaggccccgtttgccgagctggctgatgatgagaaggtctttaacgggagtgacaacatgtggcagggccaggagcaggcgctgctcccggacatcactgaagaggacctggaggccatccggctgcgggaggaggccatcctgcagatggagagcaacttgctggatgtgaatcagatcatcaaggacttggcctccatggtgtcagagcaaggagaagctgttgatagtattgaagccagccttgaggctgcgtcctcgcatgcggaggcagcccgccagctcctggctggagccagccggcaccaactccagagacacaagatcaagtgctgcttcctatcagctggagtcactgccctgcttgtcatcatcatcatcatcgccacctctgtccgaaagtgatgctacccgtgcatcggccgctgaaccgtcagctggctgtggtgtgggctctccagccccgagcacccctcctggcccggagctgggagctgatggagtccgctgcgttgtcagctgatgccgtcacctggcctgcaatggacccgagagcttcacag

SEQ ID NO: 96 - DNA, 2090 bp, Homo sapiens
gccggcgccgctgccactcccgggagcatgaaggaccgaacccaggagctccgcacggccaaggacagcgatgatgatgatgatgtcgctgtcaccgtggaccgagaccgcttcatggatgagttctttgagcaggtggaggagattcgaggcttcattgacaagatcgcagagaacgtggaggaggtgaagcggaagcacagtgccatcctggcatcccccaaccccgatgagaagacgaaggaggagctggaagaactcatgtccgacataaagaagacagcaaacaaagttcgttccaagttaaagagcatcgagcagtccatcgagcaagaggaaggcctgaaccgctcctccgctgacctgaggatccggaagacacagcactccacgctgtccagaaagtttgtggaggtcatgtcggagtacaacgccacgcagtccgactaccgcgagcgctgcaaaggccgcatccagaggcagctggagatcaccggcaggaccacgaccagtgaggagctggaggacatgctggagagtgggaaccccgccatctttgcctctgggatcatcatggactccagcatctcgaagcaggctctgagcgagattgagacgcggcacagtgagatcatcaagctggagaacagcatccgtgagctacacgacatgttcatggacatggccatgctcgtggagagccagggagagatgattgacaggatcgagtacaatgtggaacacgcggtagactatgtggagagggccgtgtctgacaccaagaaggccgtcaagtaccagagcaaggcgcgccggaagaaaatcatgatcatcatctgctgtgtgatcctgggcatcgtcatcgcctccactgttgggggcatcttcgcctagaagccacccaaactgccactccactccaggtgggccactccaaggaggccctggctgctgccacctggctgggctgccctcccaacccccgcctctggctcagagcaccctccctcccggcccccatgctcccttctctgccatgggccctccgtccccgccccgtgtcgtgtgcatgatctctgtgagtgtgcgtctgtacgggaagaggcagagggaggcagccagcggggcgtgatgcagtgtgcacagcgaggagcagacccaggcagggccgccagggtgacacaggccacccttccttgccttcagtaactcggtgggcccaggttctgctcttccctggggaccctaacctcccctccagctgacctgccctgtcctctccagctgtccccacaagcagagccctgaggggtggggaccagctggccacatggtgctgcttttcaggttaggggagaggtggccctgagggacagcccagctctgagtctcagtcgctgatcactgccagggaggctcaggctgccatggctccaggctccctcccctgcctaggggcaaagtccatcgggtcctgggcctcagcttcccttcccacattcctccggccccaggagcaaccccttgggctaggtctgaccccaggtgtccctctggaaggggctggctggtgccctatttccagccaccccagcagctagggaggcaaagcaggctgcagtcagtccctcaagccagcgttgcatgtttgggatggtggctcctgttgtcttgcgctctgggaagtcagatgtcatttcaggcctgcagtctcatcctgcccttgccatcctcccatcgatgtgccacgtgggtgtcacgtgtcccagatgcagtattcggcagccagccggggagggctacctcctcctcctcaccaccttggggcttctcatgggaaatgtgcccccgccccaggaccctctcccttgtggacaggcagggagatgcatgcgagtgcatgcagcaggggatggggccgtgtccgtgtgccccaccctccctcggctttactcctgcccagtgactgtgaccactgtccgtgttgccttcttgaacagcgattccccccaaccccttcaccaaaggtcttggtacaaccagctgcccattttgtgaaatttttatgtagaataaacatttgtatctgt

SEQ ID NO: 97 - DNA, 1780 bp, Homo sapiens
gtgacgtggccgcttccagtctttggtcgggtttcggcggcttcagtgctcggggaggaggcagtgacggccggtgagattggaagtggcggcggcggcaggcggcagaggggagtccgaggttatgcgtctcaatgatcccgcggaaacgctacgggtctaagaacacggatcagggtgtctacctgggtctctcaaagacacaggtcctgtcccctgcaactgctggcagtagcagcagcgacatcgcccctctgccccccccagtgaccctcgtccctccccctcccgacaccatgtcctgccgggatcggacccaggagtttctgtctgcctgcaagtcgctgcagacccgtcagaatggaatccagacaaataagccagctttgcgtgctgtccgacaacgcagtgaattcaccctcatggccaagcgcattgggaaagaccttagcaacacatttgccaagctggagaagctgacaatcttggcaaagcgcaagtccctctttgatgataaagcagtggaaattgaagagctaacatatatcatcaaacaggacatcaatagcctcaacaaacaaattgctcagctccaggatttcgtgagagccaagggcagccagagtggccggcacctgcagacccactccaacaccattgtggtctccttgcagtcgaaactggcttctatgtccaatgacttcaaatcggttttagaagtgaggacagagaacctgaagcagcagaggagccggagagagcagttctcccgggcacctgtgtcagccctgccccttgcccctaaccacctgggcggtggtgctgtggttctgggggcagagtcccatgcctccaaggatgtcgccatcgacatgatggactctcggaccagccagcagctgcagctcattgacgagcaggattcctacatccagagtcgggcagacaccatgcagaacattgagtcgacaattgttgagttgggctccatctttcagcagttggcacacatggttaaggaacaggaggaaaccattcagaggatcgacgagaacgtgctaggagcccagctggacgttgaggccgcccattcagagatcctcaagtacttccagtctgtcacctccaaccggtggctcatggtcaaaatcttcctcatcctcattgtcttcttcatcatctttgtggtcttccttgcttgaaccctctctactctgaggcactctgttggggtttgggaccctcctgggaaggcaagtggccagtgctgccactgagcctgtgcagggtacttgggagaaaggccctgtttccctggaactgctaagaatgaccactgcccctgatcccccaccccttgcctctggccaccctgtcttccccccaccaccctcaggcctatgaaacacacagggttctagatttgaactctgctgtgaagtgactggaagggagcagaggccagctgggggccagtgggggaggttgtttccactaggagatttttataaaccctctccagcctctcccaaaggaagcgttggcagcaaagggagatgatgcccttacccaccttcctgtgagtgaagagaggaagcagccccagggaccaattttcccaattgacctctttcttcctctttcaccatgtgaggcagggagccctgagcccttcagctgcctgcacaacccctgacattggctgctggtgactcaatctgccaaatgtgctgcagctcgttttctcccaattacagcaagactgtcagcctcaaaaaaa

SEQ ID NO: 98 - DNA, 1019 bp, Homo sapiens
tctgtttcccagaccgagagccgcgccggcaccatgtcagcttaccctaaaagctacaatccgttcgacgacgacggggaggacgaaggcgcccggccggccccttggagggacgcccgagacctccccgacgggcccgacgcgcccgcggacaggcagcagtacttgcggcaggaggtcctccgcagggctgaggccacggccgccagcaccagcaggtccctggccctcatgtacgagtccgagaaggttggggtcgcctcttccgaggagctcgcccgtcagcgaggagtcctggagcgcacagagaagatggtggacaagatggaccaagatttgaagatcagccagaaacacatcaatagcattaagagcgtgtttggggggctggtcaattacttcaaatccaaaccagtagagaccccacctgaacagaatggcaccctcacctcccagcccaacaacagattgaaagaagctataagtacaagtaaagaacaggaagcaaagtaccaggccagccacccaaaccttagaaagctggatgatacagaccctgtccccagaggggctggttctgccatgagtactgatgcttacccaaagaacccacaccttcgagcctatcaccagaagatcgacagcaacctagatgagctgtccatgggactgggtcgtctgaaggacatagccctggggatgcagacagaaattgaggagcaagatgacattcttgaccggctgacaaccaaagtggacaagttagatgtcaacataaaaagcacagaaagaaaagttcgacaactctgaagacagacggatttccactctattgtgatgaaaagatttgaaagatctttttttgaacttccaagaaatttcatttactattttagtatgtaaattaatgtgtgtttgcaaatgttataatagagtaggtcttaagacatttttgctgttataaggaagtgtttgtcccacattttcctagggttaacacctcaccaagttcttccagc

SEQ ID NO: 99 - DNA, 1130 bp, Homo sapiens
cggaagtgtccgcacgtcgggcctccgaggcttctctttctcccctggcggtccggctctcgatggtggcgtgacgggggcgggggtggcggcgcgttctcctcggttgggagggaaccagcccgcgaacccaggccgggaggggggttcggcctgggggggaagggactgacatgtctctcgaagaccccttttttgtagtccgaggcgaggtgcagaaggcggtgaacacggcccgcgggctgtaccagcgctggtgcgagctcctgcaggaaagcgcggcggtcggacgcgaggagctggactggacgaccaatgagctgcggaatggcctgcgcagcatcgagtgggacctcgaggacctggaagagaccatcggtatagtggaagccaacccaggcaagccagctgcccagaagtcacccagcgacctgctggatgccagcgcagtctcggccacatctcgctacatcgaggagcagcaggccacacagcagctgatcatggatgaacaggatcaacagctggagatggtgtctgggagcatccaggttctgaagcacatgtccggccgcgttggagaagagctggacgagcagggcatcatgctggatgccttcgcccaagagatggaccacacccagtcccgcatggacggggtcctcaggaagttggccaaagtatcccacatgacgagtgaccgccgacagtggtgtgccatcgccgtgctagtgggggtgcttctcctcgttctcatcttactattctctctctgaccccagccctccctggcaggctggtcccttaagcctggggagccaccaagcactttggagctggcctcgccccctaggaggagagggtccctcctgggtagctggagagtagagggtcccgcctggggagctgtccccatggctctcccctagagccagtgggacccttcaggaccctgggctggaaccaccaccactggtcctgtctcaagtgcacttagggggtggtggaggcagggacacctgagacacacctgtctccatttccagttccaggaccccaaagccatttgcccctgtgccttatacacgtgccaacctggaaataaaatgtcagccttttttatatgtaaa

SEQ ID NO: 100 - DNA, 885 bp, Homo sapiens
atgaaagaccgacttcaagaactaaagcagagaacaaaggaaattgaactctctagagacagtcatgtatcaactacagaaacagaggaacaaggggtgtttctacagcaagctgttatttatgaaagagagcctgtagctgagagacacctacatgaaatccaaaaactacaggaaagtattaacaatttggcagataatgttcaaaaatttgggcagcaacagaaaagtctggtggcttcaatgagaaggtttagtctacttaagagagagtctaccattacaaaggagataaaaattcaggcagaatacatcaacagaagtttgaatgatttagttaaagaagttaaaaagtcagaggttgaaaatggtccatcttcagtggtcacaaggatacttaaatctcagcatgctgcaatgttccgccattttcagcaaatcatgtttatatacaatgacacaatagcagcaaagcaagagaagtgcaagacatttattttacgtcagcttgaagttgctggaaaagagatgtctgaagaagatgtaaatgatatgcttcatcaaggaaaatgggaagtttttaatgaaagcttacttacagaaatcaatatcactaaagcacaactttcagagattgaacagagacacaaggaacttgttaatttggagaaccaaataaaggatttaagggatcttttcattcagatatctcttttagtagaggaacaaggagagagcatcaacaatattgaaatgacagtgaatagtacaaaagagtatgttaacaatactaaagagaaatttggactagctgtaaaatacaaaaaaagaaatccttgcagagtactgtgttgttggtgctgtccatgctgtagctcaaaataa

SEQ ID NO: 101 - DNA, 1106 bp, Homo sapiens
agccggctgctgagaggccggtaggcggcggcggtcccgaggggcggcggccgcgctgctccctgagaacgggtcccgcagctgggcaggcgggcggcctgagggcgcggagccatgaagctgtacagcctcagcgtcctctacaaaggcgaggccaaggtggtgctgctcaaagccgcatacgatgtgtcttccttcagctttttccagagatccagcgttcaggaattcatgaccttcacgagtcaactgattgtggagcgctcatcgaaaggcactagagcttctgtcaaagaacaagactatctgtgccacgtctacgtccggaatgatagtcttgcaggtgtggtcattgctgacaatgaatacccatcccgggtggcctttaccttgctggagaaggtactagatgaattctccaagcaagtcgacaggatagactggccagtaggatcccctgctacaatccattacccagccctggatggtcacctcagtagataccagaacccacgagaagctgatctcatgactaaagtgcaggccgaactagatgagaccaaaatcattctgcacaacaccatggagtctctgttagagcgaggtgagaagctagatgacttggtgtccaaatccgaggtgctgggaacacagtctaaagccttctataaaactgcccggaaacaaaactcatgctgtgccatcatgtgatgcagcctgccagaggcccaatgctggaatggcaccatcattcacatcagaactgcagcccctggaaaagaagagacagccatagacgaggagccagagtgggggcagactggccatttttattttgaagttcctgcgagaaatggatggtggaagggtggcgaatgttcaaattcatatgtgtggtagtgattcttggaaagaatttgaggtccccaaaggtgtatttttgggcaaatgaaaccataaactccgactggcttctgtagatgccaaagggctctttttcagctaaccctgggaaggctctgtgggagggaggtcggagccagctgtttctcgatctttggtatatctttggatcttatttgtacattaatgatattaacactcca

SEQ ID NO: 102 - DNA, 840 bp, Homo sapiens
atgcaactgacacaggatgatgatactgatgcggttgagattgctatcgacaacacggcttttatggacgagttcttttctgagattgaggaaactcggcttaacattgacaagatctcagaacatgtagaggaggctaagaaactctacagtatcattctctctgcaccgattccagagccaaaaaccaaggatgacctagagcagctcagcactgagattaagaaaagggccaacaacgtccggaacaaactgaagagcatggagaagcatattgaagaagatgaggtcaggtcatcggcagaccttcggattcggaaatcccagcactctgtcctttctcggaagtttgtggaggtgatgaccaaatacaatgaagctcaagtggacttccgagaacgcagcaaagggcgaatccagcggcagctcgaaattactggcaaaaagacaaccgatgaggagctggaggagatgttggagagtggcaacccggccatcttcacttctgggatcattgactcacagatttccaagcaagccctcagtgagattgagggacgacacaaggacattgtgaggctggagagcagcatcaaggagcttcacgacatgtttatggacatcgccatgctggtggagaatcagggtgagatgttagataacatagagttgaatgtcatgcacacagtggaccacgtggagaaggcacgagatgaaagcaaaaaagctgtgaaataccagagtcaggcccggaagaaattgataattatcattgtgctagtagttgtgttgctgggcattttagcattgattattggactttccgttggcctgaattaa

SEQ ID NO: 103 - DNA, 894 bp, Homo sapiens
atgcgcgacaggacccacgagctgagacagggggatgacagctcggacgaagaggacaaggagcgggtcgcgctggtggtgcacccgggcacggcacggctggggagcccggacgaggagttcttccacaaggtccggacaattcggcagactattgtcaaactggggaataaagtccaggagttggagaaacagcaggtcaccatcctggccacgccccttcccgaggagagcatgaagcaggagctgcagaacctgcgcgatgagatcaaacagctggggagggagatccgcctgcagctgaaggccatagagccccagaaggaggaagctgatgagaactataactccgtcaacacaagaatgagaaaaacccagcatggggtcctgtcccagcaattcgtggagctcatcaacaagtgcaattcaatgcagtccgaataccgggagaagaacgtggagcggattcggaggcagctgaagatcaccaatgctgggatggtgtctgatgaggagttggagcagatgctggacagtgggcaaagcgaggtgtttgtgtccaatatcctgaaggacacgcaggtgactcgacaggccttaaatgagatctcggcccggcacagtgagatccagcagcttgaacgcagtattcgtgagctgcacgacatattcacttttctggctaccgaagtggagatgcagggggagatgatcaatcggattgagaagaacatcctgagctcagcggactacgtggaacgtgggcaggagcacgtcaagacggccctggagaaccagaagaaggcgaggaagaagaaagtcttgattgccatctgtgtgtccatcaccgtcgtcctcctagcagtcatcattggcgtcacagtggttggataa

SEQ ID NO: 104 - DNA, 768 bp, Homo sapiens
atgtccatggaggaccccttctttgtggtgaaaggagaggtacagaaagcagtcaacactgcccagggattgtttcagagatggacagagctcctccaggacccctccacagcaacaagggaagaaatcgactggaccaccaacgagctgagaaataacctccggagcatagagtgggatctagaggaccttgatgaaaccatcagcatagttgaagcaaatcctagaaaatttaaccttgatgcaactgaattgagtataagaaaagccttcattacaagtactcggcaagttgtcagggacatgaaagatcagatgtcaacttcatctgtgcaggcattagctgaaagaaaaaatagacaggcactgctgggagacagtggcagccagaactggagcactggaacaacagataaatatgggcgtctggaccgagagctccagagagccaattctcatttcattgaggagcagcaggcacagcagcagttgatcgtggaacagcaggatgagcagttggagctggtctctggcagcatcggggtgctgaagaacatgtcccagcgcatcggaggggagctggaggaacaggcagttatgttggaagatttctctcacgaattggagagcactcagtcccggctggacaatgtgatgaagaaacttgcaaaagtatctcatatgaccagtgatcggcgccaatggtgtgccatagccatcctctttgcagtcctgttggttgtgctcatcctcttcctagtgctgtga

SEQ ID NO: 105 - DNA, 870 bp, Homo sapiens
atgaaggaccgtctggagcagctgaaggccaagcagctgacacaggatgatgatactgatgcggttgagattgctatcgacaacacggcttttatggacgagttcttttctgagattgaggaaactcggcttaacattgacaagatctcagaacatgtagaggaggctaagaaactctacagtatcattctctctgcaccgattccagagccaaaaaccaaggatgacctagagcagctcacgactgagattaagaaaagggccaacaacgtccggaacaaactgaagagcatggagaagcatattgaagaagatgaggtcaggtcatcggcagaccttcggattcggaaatcccagcactctgtcctttctcggaagtttgtggaggtgatgaccaaatacaatgaagctcaagtggacttccgagaacgcagcaaagggcgaatccagcggcagctcgaaattactggcaaaaagacaaccgatgaggagctggaggagatgttggagagtggcaacccggccatcttcacttctgggatcattgactcacagatttccaagcaagccctcagtgagattgagggacgacacaaggacattgtgaggctggagagcagcatcaaggagcttcacgacatgtttatggacatcgccatgctggtggagaatcagggtgagatgttagataacatagagttgaatgtcatgcacacagtggaccacgtggagaaggcacgagatgaaacgaaaaaagctgtgaaataccagagtcaggcccggaagaaattgataattatcattgtgctagtagttgtgttgctgggcattttagcattgattattggactttccgttgggctgaattaa

SEQ ID NO: 106 - DNA, 893 bp, Homo sapiens
gcccgcgaacccaggccgggaggggggttcggcctgggggggaagggactgacatgtctctcgaagaccccttttttgtagtccgaggcgaggtgcagaaggcggtgaacacggcccgcgggctgtaccagcgctggtgcgagctcctgcaggaaagcgcggcggtcggacgcgaggagctggactggacgaccaatgagctgcggaatggcctgcgcagcatcgagtgggacctcgaggacctggaagagaccatcggtatagtggaagccaacccaggcaagttcaagctcccagccggggacctgcaggagagaaaggtgttcgtggagcggatgcgagaggcagtccaggaaatgaaggaccatatggtcagcccaacagccgtagcatttttggagaggaataacagagagatactcgcaggcaagccagctgcccagaagtcacccagcgacctgctggatgccagcgcagtctcggccacatctcgctacatcgaggagcagcaggccacacagcagctgatcatggatgaacaggatcaacagctggagatggtgtctgggagcatccaggttctgaagcacatgtccggccgcgttggagaagagctggacgagcagggcatcatgctggatgccttcgcccaagagatggaccacacccagtcccgcatggacggggtcctcaggaagttggccaaagtatcccacatgacgagtggtgagtcccctcaggggaggggtcagtcctggtgggggcaggttgtaggtggtaccctctccccgtgacccctgaccttctcgttcccagaccgccgacagtggtgtgccatcgccgtgctagtgggggtgcttctcctcgttctcatcttactattctctctctga

SEQ ID NO: 107 - DNA, 783 bp, Homo sapiens
atgaaggaccgaacccaggagctccgcacggccaaggacagcgatgatgatgatgatgtcgctgtcaccgtggaccgagaccgcttcatggatgagttctttgagcaggtggaggagattcgaggcttcattgacaagatcgcagagaacgtggaggaggtgaagcggaagcacagtgccatcctggcatcccccaaccccgatgagaagacgaaggaggagctggaagaactcatgtccgacataaagaagacagcaaacaaagttcgttccaagttaaagagcatcgagcagtccatcgagcaagaggaaggcctgaaccgctcctccgctgacctgaggatccggaagacacagcactccacgctgtccagaaagtttgtggaggtcatgtcggagtacaacgccacgcagtccgactaccgcgagcgctgcaaaggccgcatccagaggcagctggagatcaccggcaggaccacgaccagtgaggagctggaggacatgctggagagtgggaaccccgccatctttgcctctgggatcatcatggactccagcatctcgaagcaggctctgagcgagattgagacgcggcacagtgagatcatcaagctggagaacagcatccgtgagctacacgacatgttcatggacatggccatgctcgtggagagccagcctcagggtgctttcctgaagtcctgccccgagccccaacccaaccctgaggagggggccctttggagctcgggtgcccccggccccgcagggagagatgattga

SEQ ID NO: 108 - DNA, 711 bp, Homo sapiens
atggcaccggacccctggttctccacatacgattctacttgtcaaattgcccaagaaattgctgagaaaattcaacaacgaaatcaatatgaacgaaaaggtgaaaaggcaccaaagcttaccgtgacaatcagagctttgttgcagaacctgaaggaaaagatcgcccttttgaaggacttattgctaagagctgtgtcaacacatcagataacacagcttgaaggggaccgaagacagaacctcttggatgatcttgtaactcgagagagactacttctggcatcctttaagaatgagggtgccgaaccagatctaatcaggtccagcctgatgagtgaagaggctaagcgaggagcacccaacccttggctctttgaggagccagaggagaccagaggcttgggttttgatgaaatccggcaacagcagcagaaaattatccaagaacaggatgcaggccttgatgccctttcctctatcataagtcgccaaaaacaaatggggcaggaaattgggaatgaattggatgaacaaaatgagataattgacgaccttgccaacctagtggagaacacagatgaaaaacttcgcaatgaaaccaggcgggtaaacatggtggacagaaagtcagcctcttgtgggatgatcatggtgattttactgctgcttgtggctatcgtggttgttgcagtctggccgaccaactag

SEQ ID NO: 109 - DNA, 597 bp, Homo sapiens
atgaagctgtacagcctcagcgtcctctacaaaggcgaggccaaggtggtgctgctcaaagccgcatacgatgtgtcttccttcagctttttccagagatccagcgttcaggaattcatgaccttcacgagtcaactgattgtggagcgctcatcgaaaggcactagagcttctgtcaaagaacaagactatctgtgccacgtctacgtccggaatgatagtcttgcaggtgtggtcattgctgacaatgaatacccatcccgggtggcctttaccttgctggagaaggtactagatgaattctccaagcaagtcgacaggatagactggccagtaggatcccctgctacaatccattacccagccctggatggtcacctcagtagataccagaacccacgagaagctgatcccatgactaaagtgcaggccgaactagatgagaccaaaatcattctgcacaacaccatggagtctctgttagagcgaggtgagaagctagatgacttggtgtccaaatccgaggtgctgggaacacagtctaaagccttctataaaactgcccggaaacaaaactcatgctgtgccatcatgtag

SEQ ID NO: 110 - DNA, 411 bp, Homo sapiens
atggcgggggctggttccgccgctgtatcgggggcagggaccccggtggcggggcccacaggccgcgaccttttcgccgaagggctgctggagttcctgcgacccgctgtgcagcagctcgactctcacgtacacgccgtcagagagagccaggtagagctccgggaacaaattgacaacctagccacagaactgtgccgcataaatgaggatcagaaggtggccctggatcttgacccctatgttaagaagctacttaatgcccggcgacgcgttgtcttggttaacaacattctacagaatgctcaggaacgactgagacggctaaaccacagtgttgccaaggaaacagcccgcaggagagcaatgctggattcgggaatttacccccctggctccccaggcaaatag

SEQ ID NO: 111 - DNA, 636 bp, Homo sapiens
atggataatctgtcatcagaagaaattcaacagagagctcaccagattactgatgagtctctggaaagtacgaggagaatcctgggtttagccattgagtctcaggatgcaggaatcaagaccatcactatgctggatgaacaaaaggaacaactaaaccgcatagaagaaggcttggaccaaataaataaggacatgagagagacagagaagactttaacagaactcaacaaatgctgtggcctttgtgtctgcccatgtaatagaacaaagaactttgagtctggcaaggcttataagacaacatggggagatggtggagaaaactcaccttgcaatgtagtatctaaacagccaggcccggtgacaaatggtcagcttcagcaaccaacaacgggagcagccagtggtggatacattaaacgcataactaatgatgccagagaagatgaaatggaagagaacctgactcaagtgggcagtatcctgggaaatctaaaagacatggccctgaacataggcaatgagattgatgctcaaaatccacaaataaaacgaatcacagacaaggctgacaccaacagagatcgtattgatattgccaatgccagagcaaagaaactcattgacagctaa

SEQ ID NO: 112 - DNA, 477 bp, Homo sapiens
atggataatctgtcatcagaagaaattcaacagagagctcaccagattactgatgagtctctggaaagtacgaggagaatcctgggtttagccattgagtctcaggatgcaggaatcaagaccatcactatgctggatgaacaaaaggaacaactaaaccgcatagaagaaggcttggaccaaataaataaggacatgagagagacagagaagactttaacagaactcaacaaatgctgtggcctttgtgtctgcccatgtaatagcataactaatgatgccagagaagatgaaatggaagagaacctgactcaagtgggcagtatcctgggaaatctaaaagacatggccctgaacataggcaatgagattgatgctcaaaatccacaaataaaacgaatcacagacaaggctgacaccaacagagatcgtattgatattgccaatgccagagcaaagaaactcattgacagctaa

SEQ ID NO: 113 - DNA, 693 bp, Homo sapiens
ctctaaagcgccgcagctgccaaaatgtctacaggtccaactgctgccactggcagtaatcgaagacttcagcagacacaaaatcaagtagatgaggtggtggacataatgcgagttaacgtggacaaggttctggaaagagaccagaagctctctgagttagacgaccgtgcagacgcactgcaggcaggcgcttctcaatttgaaacgagcgcagccaagttgaagaggaaatattggtggaagaattgcaagatgtgggcaatcgggattactgttctggttatcttcatcatcatcatcatcgtgtgggttgtctcttcatgaagaaccagcggaactcaaaactgctgttcaagaaacctcttcaagacttttgacttagaacctgctatattatcaagcttacctactgttatctctaaaattttttttgtgttaatgtaaagttgaatttctaggaaacgtgcctttgttttttaatatgcactccaaattagaaggccggccccgtccacattttgcacagtgcctttacagatttacgtatgggctgatgaagaggccttcttaagttccagagtgctataatctagatgtaatgttgtcactaattaattgccattactcccctttagagcacaatggatctcgagggatcttccatacctaccagttctgcgcctgcaggtc

SEQ ID NO: 114 - DNA, 760 bp, Homo sapiens
atggccaccaggcgtttaaccgacgctttcttgttgttgcggaataattccatccaaaaccggcagctgttagccgagcaagagctggacgagcttgctgatgaccgtatggcactggtgtcaggcatcagcttagatccagaagcagcgattggtgtgacaaaacggccacctcctaagtgggtggatggagtggatgaaattcagtatgatgttggccggattaagcagaagatgaaagaattggccagccttcatgacaagcatttaaacagacccaccctggatgacagcagcgaagaggaacatgccattgagataactacccaagagatcactcagctcttccacaggtgccagcgtgccgtgcaggccctgccgagccgggcccgggcctgctccgagcaggaggggcggctgcttgggaacgtggtggcctcgctggcgcaggccctgcaggaactctccaccagcttccggcacgcacagtcaggctacctcaaacgcatgaagaatcgagaggaaagatcccagcattttttcgacacatcagtaccactaatggatgatggagacgataacactctttaccatcggaggaccagttagttctggtggagcagaacacactgatggtggaagagcgggaacgagagattcgccagattgtacagtccatttctgacctgaatgaaatattcagggacttaagggcgatgattgtagaacagggtacagtccttgacagaattgactataa

SEQ ID NO: 115 - DNA, 2492 bp, Homo sapiens
gaattccggcagttggcgaccctgcactgacccgcgtccctccgtcccgagcccgcgcgccctcagagggtgcccggacagactgaagccatggcgattctttttgctgttgttgccagggggaccactatccttgccaaacatgcttggtgtggaggaaacttcctggaggtgacagagcagattctggctaagataccttctgaaaataacaaactaacgtactcacatggcaattatttgtttcattacatctgccaagacaggattgtatatctttgtatcactgatgatgattttgaacgttcccgagcctttaattttctgaatgagataaagaagaggttccagactacttacggttcaagagcacagacagcacttccatatgccatgaatagcgagttctcaagtgtcttagctgcacagctgaagcatcactctgagaataagggcctagacaaagtgatggagactcaagcccaagtggatgaactgaaaggaatcatggtcagaaacatagtctgtcaccttcaaaactaccagcagaaatcttgctcgagccatgtgtatgaagaacctcaagctcactattatcatcatcatcgtatcaattgtgttcatctatatcattgtttcacctctctgtggtggatttacatggccaagctgtgtgaagaaataggaaagaagaagttaccattaaccaaggatatgagagaacaaggagttaaaagcaatccatgtgactcaagcctttcacatactgacagatggtatctgccagtctcttcaaccctcttctcactttttaaaatcttgttccatgcctccaggtttatctttgtcttatctaccagtttattcctgtgaacttcagattgaaccattcattgcagcagtagccttaaaaaggcttttgtttatttctttggtttgttaactagtgtcatctatttagagaaacatttttgtttttaattgctcaaagctgtcgccgctagtcttatgagctatctactaaaactatggagaaactttgtatgtgcacacaaaagtattcaagagacagtattgctaacatctcatcttaatgtcttttgttattgagaagttttaggtgcttcaaaacaatataaatggataatagttgttatttggggaattgtaatgatgttggtgctgcttccttctaagagctcagacaagtaaagtatgaaacattcttatttcagttagatggggaacattttgctagcccattagaagcacacagaattatccttgtcctcctaatattgactttcaggaataaagttcagtgtgctgatcattcacaatacagtggatagcttgatatcttctgttttcccattgcagttgatttgagaagatgaaggtttaaatattgttgaaagttgcagttttttaaatgtgttcctttttcttctgtgaatatttagggcaatcgtgtcgctaatagaatatgtagtagagggggtggggaggtaaattcctctgacttgccaaagaaaaagaagggaaccacagtggatatgctagcattttagctgtgcaaagggaggtagtgtgggaaaagtgtttccattctgggaaaagcccaaaccgaatacggtcagcagtcaactccagggtttgggcttgattcctgttgaataatagttttgagcattctttgtggttaaataaattcttaaatctgcctagttttgatgaattcttttgtgaaacttgaaagagaatagacagtatgacatatagaattaatacaaaacagtttaacaaccatttaactgcagtgtaagaaaattggactgtaatcatatcgctactggcatctgttatctagtatgcatttctggtgtgtatctgaaaggaagacattttctaccctagatccaattgcatttatttatcaataagtgccattaaattgaaattatattacattttacactttctcaatgaatgaacaaattagtctgtagaatctagccacctgtttagcctagtcatgtgccttgaacatatatgtgtcccataatctggctcatggtacctgttcttctatccaaacctttcaattcatgctacctgattcatttatttgacatagatcttaggcccacttgaactcttttcttgtttatctagcatagcacaaacgtttttccagtcttctttatcaacactaatgcctcttaattgcatcagtatttcctattggaaaatacatctgttccagaaaaacatttggcattcctgaataatttccaaatgtttttaatccaaagaaaaaggtttaaagcttatttccctttcttatacacacctgaataaaattgatgtgcatgttttagggatcaattacctaactgttccttggtctatttatgtataagaatgctttttaaagcacatgtctcattttaaatgacgcacaaactgaagatgttaataaaatggaattc

SEQ ID NO: 116 - DNA, 1580 bp, Homo sapiens
gctatggcggtggacatcacgctgctattccgggccagcgtcaagaccgtgaagacgcggaacaaggcgctgggagtggcggtgggcggcggggtcgatggcagccgggacgagctgttccgccggagcccccggcccaagggcgacttctccagccgggcccgcgaagtgatttctcacattggcaaactgagagattttcttctggaacacaggaaagattatattaatgcttatagccataccatgtctgaatatgggaggatgacagacacagaacgagaccagatagaccaggatgcccagatattcatgaggacctgttcagaagcaattcagcaactacgaacagaagctcacaaggagatacattcccagcaagtgaaggagcacaggaccgctgttttggatttcattgaagattacttgaaaagagtatgtaaactttactcagaacagagagccatccgagttaaaagagtggtggataagaaaagattatctaagctggaaccagaaccaaatacaaagacaagagaatccacatcttctgagaaagtttcacagagtccttcaaaagactctgaagaaaaccctgccactgaagaacgtccagaaaaaattttggctgaaacacaacctgaattgggaacgtggggagatggcaaaggcgaagatgagttatccccagaagaaatacaaatgtttgaacaggaaaatcagcgactaattggtgaaatgaacagcttgtttgatgaagtgaggcaaatcgaagggagagtggttgagatttccagactccaagagatattcacggaaaaggttttgcaacaggaagctgagattgacagcattcaccagttagttgtgggggcaactgaaaatatcaaggaaggcaacgaagacataagagaggccattaaaaacaacgctggcttccgcgtgtggatcctcttcttcctcgtgatgtgctccttctccttgctcttcctcgactggtacgacagctagccagggccacgggggcccagcacgagagtcctcatgggcactcacagactgcgtgctttcatgtacttccagtgctggagcatggtatgaccagattttatcacagtgccatttgaagggaaaggagttcagacagacagacgtattccccaaaaagggataccccaggccgatggtgttcagccatttagcagctgaaaaaggaaacagtgcacaccaatgggaggcagcctgcgtagccctcatcaggcaagacagactgaatgcaggagtgggtgattagctgctccttgaacttgaggctgccttggcagcaggggcacagcaggcctcaagagcccctaattgtctcagggttcaaaggaagacactgacctttcccatcccggtagcttcagggaagatcatagttaataacgtctctcaacaaatgattacttctttgtttccttgtggcttcttgtctgtctgagtcaacgaatacacagacttactggattatagaagagaaaattcacatctgccttgttaatctaataaatataattacagccccttaaaaaaaaaaa

SEQ ID NO: 117 - DNA, 5530 bp, Homo sapiens
ggcggcccctgcagggcagctgaagccatggaagcctccgcaggtcgctgatcagggccaggcggctgcagcagcgactgcagaggcgctgcgccaagccgggccggagtggtgcgagccggcggggctgcggagggccagtggactcagggttgttgagaggagtcaatggcataatacgggaagccccgaaccacgggccaactgggaagttgatggtcggcgagaccagcccatcctaatttggggttcctggtcctgctccaggagtcctacagcctgcagcccctaccagagagggaggactgaacagcaagggggtgtgtgggtctgagtatcagggtcctggggaagaagcaggcctggctcgtagagtagaagactcggtgccggcagtcaggaggccctgctcctgaagcctctgtgaccttgggcacggccttcactctgtctggggcacattcactcatctggagaacacagggttggactgattacttttagccactcctgacagttgtggttttaagttgggtggtgggaacctgtgcaccagccctattcaattcactggtggaggcagccgtggtctgccaggccctcgctcctggggtgtcctgccgaagggtgagaagagaagccatgccgggcagcggccccagcgagaggatgacgtggcctggcccggccctttctgcgggccccccaacccgccctctctcctcagcccccgggataccgcccatcccaccccttactcggacccacagcctcatggccatgtccctgccaggaagtagacggacctctgctggatcacgcaggcgcacctctccacctgtgagcgtgcgggatgcctacggcacctcttcgctcagcagcagcagcaattctggctcctacaagggcagtgacagcagtcccacgccaaggcgctccatgaaatacacgctgtgcagtgacaaccatggcatcaagcccccgaccccggagcagtacctgacccccctgcagcagaaggaggtgtgcatccggcacctgaaagcccggctgaaggacacacaggaccggctccaggaccgggacacagagattgatgacctgaagacgcagctgtcacgcatgcaggaggactggattgaggaggagtgccaccgcgtggaggcccagctggccctgaaggaggcccgaaaggagatcaagcagctcaagcaggtcatcgacactgtcaagaacaacctgattgacaaggacaaggggctgcagaagtacttcgtggacatcaacatccagaacaagaagctggagacgctgctgcacagcatggaggtggcccagaatggcatggccaaggaggatggcactggggagtcagccggtgggtcccctgcccgctccctcacccgcagctccacctacaccaagctgagtgacccggctgtctgtggtgaccgccagccgggtgatccctccagcggctctgctgaggatggggcagacagtggctttgcagcagccgatgacacactgagccggacggacgcgctggaagccagcagcctgctgtcgtcgggggtggactgtggcaccgaggagacctcgctgcacagctccttcggcctgggcccccgcttccctgccagcaacacctatgagaagctgctgtgtggcatggaggctggtgtgcaggccagctgcatgcaggagcgtgccatccagacagacttcgtgcagtaccagcctgaccttgacaccatcctggagaaagtgacccaggcccaggtctgtgggacagaccctgagtcaggggacaggtgcccagagctggatgcccacccttcagggcccagagaccccaactcagcagtggtggtgacagtgggtgatgagctagaggccccagagcccatcacccgtggacccaccccacagcggcctggtgccaaccccaaccctggccagtcggtgagcgtggtgtgccccatggaagaggaggaggaggctgccgtggctgagaaggagcccaagagctactggagccgccactacatcgtggatctgctggctgtggtggtgccggccgtgcccacggtggcctggctttgccgctcccagcggcgccagggccagcccatctacaacatcagctccctgctgcggggctgctgcactgtggccttgcactccatccgcaggatcagctgccgctcgctgagccagccgagtcccagcccagcgggcggcggctcccagctctgagggggcccattccggcagcggcgcctgcggcctgaccactgattgtagggatgccgttcccccctcccttctcccatgggcatcatcttatttatttagttttgggtgtggaactgtttctttttttcaagatgttaaaacagtcccgtggaaggagcaggggttggagaaaggcatcccaaagcttcgatggagagcagggaagggggacccaaggcaggaggtacaccagctggacaaattgcagggaggggagggagcgagggccaacccggcccctctgtccccttggctcttcagacagggccagccctgctcaggaagtctctggctgtcttcatgtggggaagccgggcttgagttgcccataggcccctgccctgcaccatcctgtccagtgccctgcgcactccatgccgtctcttccaagccaccttgcccgcagcccaggctcctgggccagtgctctctcctcaaatggaggcagccatggcctgaagtgcagatcactgacccagggctcagagcagaggccagaaccactgggccggccggcattccagcctccccagactgctgcccaccttgggactcaggagctcagtcaaggccacaggctggaggagagacggggctgggcgcaaggtggcggagggcagtgtgggttctgtgtctgtctgttcatcccaggctttcccgtcatccctttcctcttggcacttctgggtgtgtcagtcattattcctgtgaggtagctaagcccggcaagctcagtgctggggtaggagggcctgcctgagtcccagctcccagctggagaatccaccagcacaagaagaggaggcaggggcagaaacccaagggggctcccccagccttccaaggtgaggccatctcatctgcaggctgggaggcagggctggactcaggaacccacagcttactgaaaaagccagaggccatgactgcccccagaaacttgccccgagtttctctggggccctcgggcccaacttctgctttgcactatgttcactttggggttggttctcagccatccaagggtctccagtgaggtggctgcttgctgtctgagatgagggttcctaaaccttaaacctctctgcctctggaggagggtggggtattctggcaggatgaatcgcaggatggcgcgtactgaagccacgatgttcatccaggccaaagcagggtgtcctgggataggtttcctaggcaggggcgtggcagagcaggtaggcgccctgcaccctccctgctcccagcccaaggccagtcggcctgggaagttcactgccccaactcttttcccgggaccatactgagtcccccagccacgctgctgacattaccattattattttaccaagtaaactcactccttttcccccacaggggttacacccatctggttgtcccacccactcttcagaggctaggccccacctctgggggttggagggaccctgtgtcttactcgcccctctggcctaagggccactctggttatctgccaaggttgcttgccctcaccccaatgctccaacagccattgcctaactcatgggctctgcccttctgctcggtgccctccacgtgaggcggggcacctgcatgcactgggagggggcggctggcccagccctcggggcaggagccccctctgccacacgctttgtgcctccaaagctccccccgccttggtcagggcctcagaccagccaacctttgtggaataagccccagcccagccaaaccaaacccagatgcctgaggcctggctggggctgcccccgcaggacactgtggccatgccacggagggggcagtggacaaaaccaatccaaagccaagccgggactggctgcggacccagcctcctgtgccgcgcactcacggagctgcgtagtctcctcagacatagtcaaagctttgccgagaaaagaaatgtatgaactatatttgacaacataaaatctctctatttttcaccactggaatttagtcaagcttcaggcccctctgctcctgtctgtgtcttgcgtctgtggccttcctattgtgtcttgtgttttggtggatgtgacagggctggggccacagtctactctgtctctgctgctagagaagccacctgtggaggactgggctgtggttgggcctgaggcctgtggaggaggtgagtgtagccagcagcggccgtctactcctgttctggcctgagaccaccggtgtgggtcacgaggaccctggcccacagtgttgagggtcctctctttcgggggctctcctggggccttcgatgggcttttcttcttgtcagtggagggagcagctccccactcagccctgggacaggccctgggactgtggtggccggtggccctggcccagctctggagtgcatgtgtgtgtgctcagatcccgcatctatgcaaaggtgcaggctgcctgtgaggctccaggcggtggaggtgcggcagctgctgctcaggtgccatgccctgaagaggcagggtacacatggggctgggagggcaaagatggggcggggcctccccctgagagagctcaccctccacagtgacccttttccttcctgcctaatacctcctcccgttgggctgtgacttttcctcctgccctcagcctctgaaacagaaatctttggggcctcccctttccccagcgtctggcaagagctgatgaggtcctgaggaacagtgtccccaggaaccaccttctggagcctagcggccagacgtggcttctcctgagttctagggctcgggccagagtggcactactgcccggccagtccaggctcaggcaggaatcggacgctggggcccgggctctgcacagagagctgggcttgagtggagtttattgtagatttctcccaaggggatcacttagcttctcactgacacacccttcccaattgccacaagcgcaggggtatcttacagcactttggggaggggtgggacaaactgcaaggttctggggccaaggcctacccaggggcctctgcccagagaactcacaaccccctctctgacctaggggacaatgcaaacaggtcacagtgcattcccatattaggccatccccttcacgaagaattcaggggatgtgggaagtggggaggcggggagggatcttgactcttgtctcctttgtccttttgttcagacagagttgtacctgcagcagacaactctgaattaaagcatgaaaacacagc

SEQ ID NO: 118 - DNA, 411 bp, Homo sapiens
atggcgggggctggttccgccgctgtatcgggggcagggaccccggtggcggggcccacaggccgcgaccttttcgccgaagggctgctggagttcctgcgacccgctgtgcagcagctcgactctcacgtacacgccgtcagagagagccaggtagagctccgggaacaaattgacaacctagccacagaactgtgccgcataaatgaggatcagaaggtggccctggatcttgacccctatgttaagaagctacttaatgcccggcgacgcgttgtcttggttaacaacattctacagaatgctcaggaacgactgagacggctaaaccacagtgttgccaaggaaacagcccgcaggagagcaatgctggattcgggaatttacccccctggctccccaggcaaataa

SEQ ID NO: 119 - DNA, 2490 bp, Homo sapiens
agctcgcgcgcctgcaggtcgacactagtggatccaaagaattcggcacgagggaagatggcgccgccggtggcagagagggggctaaagagcgtcgtgtggcagaagataaaagcaacagtgtttgatgactgcaagaaagaaggcgaatggaagataatgcttttagatgaatttaccactaagcttttggcatcgtgttgcaaaatgacagatcttctagaagaaggtattactgttgtagagaatatttataagaaccgtgaacctgtcagacaaatgaaagctctttatttcatcactccgacatcaaagtctgtagattgtttcttacatgattttgcaagtaaatcggagaacaagtataaagcagcatatatttacttcactgacttttgccctgataatctctttaacaaaattaaggcttcttgctccaagtcaataagaagatgtaaagaaataaatatttccttcattccacatgaatctcaggtgtatactcttgatgtaccagatgcattctattactgttatagtccagaccctggtaatgcaaagggaaaagatgccattatggaaacaatggctgaccagatagttacagtgtgtgccaccttggatgaaaatcccggagtaagatataaaagtaaacctctagataatgccagtaagcttgcacagcttgttgaaaaaaagcttgaagactactacaagattgatgaaaagagcctaataaagggtaaaactcattcacagctcttaataattgatcgtggctttgatcctgtgtccactgtcctgcatgaactgacctttcaggcaatggcatatgatctactaccaattgagaatgatacatacaaatataaaacagatggaaaagaaaaggaggccatccttgaagaagaagatgacctctgggttagaattcgacatcgacatattgcggttgtgttagaggaaattcccaagcttatgaaagaaatttcatcaacaaagaaagcaacagaaggaaagacatcacttagtgctcttacccagctgatgaaaaagatgccccatttccgaaaacagattactaagcaagttgtccatcttaacttagcagaagattgcatgaataagttcaagcttaatatagaaaagctctgcaaaactgaacaggacctggcacttggaactgatgcagaaggacagaaggtgaaagattccatgcgagtactccttccagttctactcaacaaaaatcatgataattgtgataaaataagagcaattctactttatatcttcagtattaatggaactacggaagaaaatttggacaggttgatccagaatgtaaagatagaaaatgagagtgacatgattcgtaactggagttaccttggtgttcccattgttccccaatctcaacaaggcaaaccgttaagaaaggatcggtctgcagaagaaacttttcagctctctcggtggacaccttttatcaaagatattatggaggatgctattgataatagattagattcaaaagaatggccatattgttcccagtgtccagcagtatggaatggttcaggagctgtaagtgctcgccagaaacccagagctaattatttagaagaccgaaaaaatgggtcaaagctgattgtttttgtaattggagggatcacatactctgaagtgcgttgtgcttatgaagtttctcaggcacataaatcctgtgaagttattattggttctacacatgttttaacacccaaaaagctgttggatgatataaagatgctgaataaacccaaggataaagtctccttaattaaagatgaatagcatttctttttggagggtttagagattcttactaatatgttgaactaaaatagaaagaaaatgttgctgtcatgtaatttaaacaatgtaaatattttatggaataatggcttttcaaatacatttcttaaggaactgtttatgattattactggatttgtcatttttgataatttaaatattgctgctgctttgtagatgatgagaagaaatgttaaagtgctttctaaaaggaaattttttcacctttggaggagaatatattagagttgtgggtaatttttcacagccacctatgtacatactaattacccattggatacttatatctaaaagtctcatgctgaagtatagtttttgggaaagaatgattttaaataaagagattgtaaaagtaaaaaactgtaaatgtatatgtatgatagaattgtttcctctaagtgtagtttttctttcaactaaaattcagtttatgtgtaaaataattcagtcattaatagaaatggagtgatttcacagtgtgtactgttttgccacatacttctaaagaacacaattttatataattttgaaatcatgtatgtttaaattagaaaaccaaaaatcatgaacattctaagagaaaataaatatagaatttaaaaaattaaaaaa

SEQ ID NO: 120 - DNA, 980 bp, Homo sapiens
gcacgagcaaagatggcggcagggaccagcagttactgggaagatctcaggaaacaggctcgacagctggaaaatgaacttgacctgaaactagtttccttcagcaaactatgtacaagttacagtcatagcagtacccgagatggaagacgcgacaggtatagttctgatacaacaccccttttaaatggatcaagccaagacagaatgtttgagacaatggcgattgagattgaacaacttttggcaaggcttacaggggtaaatgataaaatggcagaatataccaacagtgcaggtgtcccctccttgaatgcagccctgatgcatacattacagcggcatagagacatattgcaggattatacacatgaattccataaaaccaaagcaaactttatggcaatacgggaaagggagaatcttatgggatcagtacgaaaagatattgagtcatataaaagtgggtctggagtaaacaacagaagaactgagctatttttgaaagaacatgaccaccttcgaaactcagatcgtctgatagaagagacaataagcattgctatggcaacaaaagaaaatatgacttcacagagaggaatgttgaagtcaattcacagcaaaatgaacactttggccaatcgttttcctgctgtaaacagcctgatccagaggatcaacctgaggaagcggcgggactcgctcatcctagggggtgttattgggatctgtaccatcctgttgctgctgtatgcgttccattgatgggacatcttcagggactcttgacagccaccgctttcacaccctggtctggaataaggaaacatcggagggagaagttgactgtcttgataattagcctgaccagcaggatgaatgcaagactgacagtgatggactctgtgacatggtcaggttgagctgaagccacagtttctctgtgctgtgttttctaacacatttttctgtttttaatt

SEQ ID NO: 121 - DNA, 864 bp, Homo sapiens
atgaaagaccggctagcagaacttctggacttgtccaagcaatatgaccagcagttcccagacggggacgatgagtttgactcgccccacgaggacatcgtgttcgagacggaccacatcctggagtccctgtaccgagacatccgggacattcaggatgaaaaccagctgctggtggccaatgtgaagcggctgggaaagcagaacgcccgcttcctcacgtccatgcggcgcctcagcagcatcaagcgcgacaccaactccatcgccaaggccatcaaggccccccccgaggtcatccactgcaacgtgcgcgccatgaaggagctgagcgaggcggctgaggcccagcacggcccagcactcggcagtggcggcatttcgcgggcgcagtacaacgcgctcaccctcaccttccagcgcgccatgcacgactacaaccaggccgagatgaagcagcgcgacaactgcaagatccgcatccagcgccagctggagatcatgggcaaggaagtctcgggcgaccagatcgaggacatgttcgagcagggtaagtgggacgtgttttccgagaacttgctggccgacgtgaagggtgtgcgggccgccctcaacgagatcgagagccgccaccgcgaactcgtgcgcctggagagcgccatccgcgacgtacacgagctcttcttgcagatggcggtgctggtggagaagcaggccgacaccctgaacgtcatcgagctcaacgtacaaaagacggtcgactacaccggccaggccaaggcgcaggtgcggaaggccgtgcagtacgaggagaagaacccctgccggaccctctgctgcttctgctgtccctgcctcaagtag

SEQ ID NO: 122 - DNA, 1507 bp, Homo sapiens
ctcgaggccacgaaggccccgacaccatgtcctgccgggatcggacccaggagtttctgtctgcctgcaagtcgctgcagacccgtcagaatggaatccagacaaataagccagctttgcgtgctgtccgacaacgcagtgaattcaccctcatggccaagcgcattgggaaagaccttagcaacacatttgccaagctggagaagctgacaatcttggcaaagcgcaagtccctctttgatgataaagcagtggaaattgaagagctaacatatatcatcaaacaggacatcaatagcctcaacaaacaaattgctcagctccaggatttcgtgagagccaagggcagccagagtggccggcacctgcagacccactccaacaccattgtggtctccttgcagtcgaaactggcttctatgtccaatgacttcaaatcggttttagaagtgaggacagagaacctgaagcagcagaggagccggagagagcagttctcccgggcacctgtgtcagccctgccccttgcccctaaccacctgggcggtggtgctgtggttctgggggcagagtcccatgcctccaaggatgtcgccatcgacatgatggactctcggaccagccagcagctgcagctcattgacgagcaggattcctacatccagagtcgggcagacaccatgcagaacattgagtcgacaattgttgagttgggctccatctttcagcagttggcacacatggttaaggaacaggaggaaaccattcagaggatcgacgagaacgtgctaggagcccagctggacgttgaggccgcccattcagagatcctcaagtacttccagtctgtcacctccaaccggtggctcatggtcaaaatcttcctcatcctcattgtcttcttcatcatctttgtggtcttccttgcttgaaccctctctactctgaggcactctgttggggtttgggaccctcctgggaaggcaagtggccagtgctgccactgagcctgtgcagggtacttgggagaaaggccctgtttccctggaactgctaagaatgaccactgcccctgatcccccaccccttgcctctggccaccctgtcctccccccaccaccctcaggcctatgaaacacacagggttctagatttgaactctgctgtgaagtgactggaagggagcagaggccagctgggggccagtgggggaggttgtttccactaggagatttttataaaccctctccagcctctcccggaaaggaagcgttggcagcaaagggagatgatgcccttacccaccttcctgtgagtgaagagaggaagcagccccagggaccaattttcccaattgacctctttcttcctctttcaccatgtgaggcagggagccctgagcccttcagctgcctgcacaacccctgacattggctgctggtgactcaatctgccaaatgtgctgcagctcgttttctcccaattacagcaagactgtcagcctcca

SEQ ID NO: 123 - DNA, 1614 bp, Homo sapiens
gagggagccgtggaggtccaggtgactgcttagaaaactgcacagcatctgatgaaattagcgaataagaacatcaaccatgtcttacactccaggagttggtggtgaccccacccagttggcccagaggatctcttctaacatccagaagatcacacagtgttctgtggaaatacaaagaactctgaatcaacttggaacacctcaagattcacctgaattgaggcaacagttgcaacagaagcagcagtatactaaccagcttgccaaagaaacagataagtacattaaagagtttggatctctgcccaccacccccagtgaacagcgtcaaaggaaaatacagaaggatcgcttagtggcagagttcacaacatcactgacaaacttccagaaggtccagaggcaggctgctgagcgagagaaagagtttgttgctcgagtaagagccagttccagagtgtctggcagttttcctgaggacagctcaaaagaaaggaatcttgtatcctgggaaagccaaactcaacctcaagtgcaggtgcaggatgaagaaattacagaggatgacctccgtcttattcatgagagagaatcttctatcaggcaacttgaagctgatattatggatattaatgaaatatttaaagatttgggaatgatgattcatgaacaaggagatgtaatagatagcatagaagccaatgtggaaaatgcagaggtgcacgttcagcaagcaaatcagcagctgtcaagggcagcagattatcagcgcaaatccagaaaaaccctgtgcatcatcattcttatccttgtcattggagttgcgattatcagtctcatcatatggggattgaaccactgaagttataaaggagcacactgtcgcactacattgtctaaattatgtaggaagattcctgtaatcatgtttttttaattattattttaaagctattgtataaaggatggttcccatactttgttatttttattgggggggttgggcgggttcctttggattaaatctgatattttctaatactgaaagattttctaaatgtcactgctgacataactcccttggtcttcaatttaatagttgttaagttttgggccacattgcatatgcctttcatttataatttatttaccctgcttgacttagtttggggaattcggaaatttaaggtgtgtgtattctgttgggatctccctgccacgtgaacacaccaagatgtgtgttacttcaagttaaaactccccaaaatttaatttttgatttgcttccaccaggggaaaatattctccaataatgtaaaataattaaggtccaatacatgggttgtatttttctggttcacaacagcacaaagtgtctttcatttttttgttggatttcctttaagatcttttttaccctgaagtcggtgaacacttttctagttaatttgatactctttctgtgtatataataagcttttgctgtagattgcctagtaaaattactaaggataggttgtttttacatatggtctatttaagtctgatgtttacgggggagagtgtagttactaaaaatgtttaacataatttggaagaagagtatgaaca

SEQ ID NO: 124 - DNA, 691 bp, Homo sapiens
accaacggtctccccctcccagcttcttacctcggcttcctactccttcccccgcccgcccagcaccgccagcccgggagagctgccgggagttccccgggagcgctgccgggagttccccgggagcctcaggtggtgactatcctgttgagaagcaaaagatactttgcaagtaaaaaatatgcctcccaagtttaagcgccacctcaatgatgatgatgtcacaggttctgtgaaaagtgaaaggagaaatcttttggaagatgattcagatgaagaagaggacttttttctaaggggaccatctggaccaagatttggacctagaaatgataaaattaagcatgttcagaatcaagtggatgaagttattgatgtcatgccagaaaatattacaaaggtaattgagagaggggagagactagatgaactacaggacaaatcagaaagcttatcggataatgcaacagcttttagcaacagatccaaacaacttcgaaggcaaatgtggtggcgtggatgcaaaataaaagccatcatggctttggttgctgctatccttttgctagtgattatcattcttatagtcatgaaataccgtacttgatttgatgacagagatcttcattaacaagatctggacagtaataaagatgctgcataattaatgaactatgtgtatatacttcaa

SEQ ID NO: 125 - DNA, 924 bp, Homo sapiens
atggccaccaggcgtttaaccgacgctttcttgttgttgcggaataattccatccaaaaccggcagctgttagccgagcaagagctggacgagcttgctgatgaccgtatggcactggtgtcaggcatcagcttagatccagaagcagcgattggtgtgacaaaacggccacctcctaagtgggtggatggagtggatgaaattcagtatgatgttggccggattaagcagaagatgaaagaattggccagccttcatgacaagcatttaaacagacccaccctggatgacagcagcgaagaggaacatgccattgagataactacccaagagatcactcagctcttccacaggtgccagcgtgccgtgcagccctgccgagccgggaaagggcctgctccgagcaggaggggcggctgcttgggaacgtggtgcctcgtggcgcaggccctgcaggaactctccaccagcttccggcacgcacaatcaggctacctcaaacgcatgaagaatcgagaggaaagatcccagcattttttcgacacatcagtaccactaatggatgatggagacgataacactctttaccatcggggttttacagaggaccagttagttctggtggagcagaacacactgatggtggaagagcgggaacgagagattcgccagattgtacagtccatttctgacctgaatgaaatattcagggacttaggggcgatgattgtagaacagggtacagtccttgacagaattgactataacgttgaacagtcctgtatcaaaactgaagatggtttgaaacagcttcacaaggcagaacagtatcaaaagaagaatcggaagatgcttgtgattttaatattatttgtcatcatcattgtgctcattgttgtcctcgttggcgtgaagtctcgataa

SEQ ID NO: 126 - DNA, 750 bp, Homo sapiens; identical to SEQ ID NO: 56

SEQ ID NO: 127 - DNA, 895 bp, Homo sapiens
atgcgcgacaggacccacgagctgagacagggggatgacagctcggacgaagaggacaaggagcgggtcgcgctggtggtgcacccgggcacggcacggctggggagcccggacgaggagttcttccacaaggtccggacaattcggcagactattgtcaaactggggaataaagtccaggagttggagaaacagcaggtcaccatcctggccacgccccttcccgaggagagcatgaagcaggagctgcagaacctgcgcgatgagatcaaacagctggggagggagatccgcctgcagctgaaggccatagagccccagaaggaggaagctgatgagaactataactccgtcaacacaagaatgagaaaaacccagcatggggtcctgtcccagcaattcgtggagctcatcaacaagtgcaattcaatgcagtccgaataccgggagaagaacgtggagcggattcggaggcagctgaagatcaccaatgctgggatggtgtctgatgaggagttggagcagatgctggacagtgggcaaagcgaggtgtttgtgtccaatatcctgaaggacacgcaggtgactcgacaggccttaaatgagatctcggcccggcacagtgagatccagcagcttgaacgcagtattcgtgagctgcacgacatattcacttttctggctaccgaagtggagatgcagggggagatgatcaatcggattgagaagaacatcctgagctcagcggactacgtggaacgtgggcaggagcacgtcaagacggccctggagaaccagaagaaggcgaggaagaagaaagtcttgattgccatctgtgtgtccatcaccgtcgtcctcctagcagtcatcattggcgtcacagtggttggataas

SEQ ID NO: 128 - DNA, 639 bp, Homo sapiens
atggatcccctgttccagcaaacgcacaagcaggtccacgagatccagtcttgcatgggacgcctggagacggcagacaagcagtctgtgcacatagtagaaaacgaaatccaagcaagcatagaccagatattcagccgtctagaacgtctggagattttgtccagcaaggagccccctaacaaaaggcaaaatgccagacttcgggttgaccagttaaagtatgatgtccagcacctgcagactgcgctcagaaacttccagcatcggcgccatgcaagggagcagcaggagagacagcgagaagagcttctgtgtcgaacgttcaccactaacggctctgacaccaccataccaatggacgaatcactgcagtttaactcctccctccagaaagttcacaacggcatggatgacctcattttagatgggcacaatattttagatggactgaggacccagagactgaccttgaaggggactcagaagaagatccctgacattgccaacatgctgggcttgtccaacacagtgatgcggctcatcgagaagcgggctttccaggacaagtactttatgataggtgggatgctgctgacctgtgtggtcatgttcctcgtggtgcagtacctgacatga

SEQ ID NO: 129 - DNA, 1903 bp, Homo sapiens
gggacgcgctacctgcctccgggcgcctgggcttcaggatgaaggaccgtctggagcagctgaaggccaagcagctgacacaggatgatgatactgatgcggttgagattgctatcgacaacacggcttttatggacgagttcttttctgagattgaggaaactcggcttaacattgacaagatctcagaacatgtagaggaggctaagaaactctacagtatcattctctctgcaccgattccagagccaaaaaccaaggatgacctagagcagctcacgactgagattaagaaaagggccaacaacgtccggaacaaactgaagagcatggagaagcatattgaagaagatgaggtcaggtcatcggcagaccttcggattcggaaatcccagcactctgtcctttctcggaagtttgtggaggtgatgaccaaatacaatgaagctcaagtggacttccgagaacgcagcaaagggcgaatccagcggcacgtcgaaattactggcaaaaagacaaccgatgaggagctggaggagatgttggagagtggcaacccggccatcttcacttctgggatcattgactcacagatttccaagcaagccctcagtgagattgagggacgacacaaggacattgtgaggctggagagcagcatcaaggagcttcacgacatgtttatggacatcgccatgctggtggagaatcagggtgagatgttagataacatagagttgaatgtcatgcacacagtggaccacgtggagaaggcacgagatgaaagcaaaaaagctgtgaaataccagagtcaggcccggaagaaattgataattatcattgtgctagtagttgtgttgctgggcattttagcattgattattggactttccgttgggctgaattaagagtggcctaagaggctgctgcactgaaataaactgatttcactccagactggtgtggccacccttgtcttcagatgagaatggagtctgaatggccttcctgagagcgagtgcgacccgttcctttgtttccttgcaaccacccttggacctgactcagctaacaatctagccctgggggaatgtgatctacctgatgcgaccctgagttctccccagagcctcctcctgccccaccagctctcaagtaccttttctcctggactgtgtggacccacccagctttcttcctccctgttgtgtgtcagattatgccttgcacttgggaaagctcttgtgagactctcccaaggtgctgtattttcctacctcaggagtattctccagaaactgcaatgtatttttttaggggagtatctttaacaaagcagaatgattcttctaagtttggcaacaagaaggcttggatctgagtcttctacctggcaggatgccaatcctgtttgttgtccgtatgtcctgaaaacatgagggactggcagatgtcattttggtctaaagagctgacttgtttgaaattcagccttaaattaagctcttagttgttcagcttggggggcaactttgatttttctctgtgttgtagtctctcatatttactcaaggaggaccaggatgatacagtcatctgaggttatgctttgcaaaaggctgacggtatggaatatgtttccatgtctgagtcttagaaactggctgctcattgttagaaagtgatgctttgtgagactattgtcttggggccaaaaataatcagggattttaaattgggcaagggagaaggtgctagaatcctaagctctggaaatatttcatgacactggtgtttcactcatgtgttccagatgtattctaattgtgtatgaaatgtatgtacacataagtgtgtgtgtctcaggaagtaggaaataaaaatggaagctattatgacctca

SEQ ID NO: 130 - DNA, 1248 bp, Homo sapiens
caagatatcgaattccaaatttgagggcctcccggctctggcgccggagggagagctcaggccgccatgcgcgacaggacccacgagctgagacagggggatgacagctcggacgaagaggacaaggagcgggtcgcgctggtggtgcacccgggcacggcacggctggggagcccggacgaggagttcttccacaaggtccggacaattcgtcagactattgtcaaactggggaataaagtccaggagttggagaaacagcaggtcaccatcctggccacgccccttcccgaggagagcatgaagcaggagctgcagaacctgcgcgatgagatcaaacagctggggagggagatccgcctgcagctgaaggccatagagccccagaaggaggaagctgatgagaactataactccgtcaacacaagaatgagaaaaacccagcatggggtcctgtcccagcaattcgtggagctcatcaacaagtgcaattcaatgcagtccgaataccgggagaagaacgtggagcggattcggaggcagctgaagatcaccaatgctggcatggtgtctgatgaggagttggatcagatgctggacagtgggcaaagcgaggtgtttgtgtccaatatccttaaggacacgcaggtgactcgacaggccttaaatgagatctcggcccggcacagtgagatccagcagcttgaacgcagtattcgtgagctgcacgacatattcacttttctggctaccgaagtggagatgcagggggagatgatcaatcggattgagaagaacatcctgagctcagcggactacgtggaacgtgggcaggagcacgtcaagacggccctggagaaccagaagaaggtgaggaagaagaaagtcttgattgccatctgtgtgtccatcaccgtcgtcctcctagcagtcatcattggcgtcacagtggttggataatgtcgcacattgttggcactaggagcaccaggaacccagggcctggccttctctcccagcagcctggggggcaggcagagcctccagtcggaccccttcctcacacactggcccctatgcagaagggcagacagttcttctggggttggcagctgctcattcatgatggcctcctccttcaggcctcaatgcctgggggaggcctgcactgtcctgattggccgggacacacggttttgtaaaaaattaaaaaacaaaaaaagagcatagaaaaaaaaaaaaccgagt

SEQ ID NO: 131 - DNA, 21 bp, Rattus norvegicus
tttctccgcgtccgccatggt

SEQ ID NO: 132 - DNA, 21 bp, Rattus norvegicus
tttcctcgcgtcccgcatggt

SEQ ID NO: 133 - DNA, 20 bp, Rattus norvegicus
ggcaatcctacaggttccag

SEQ ID NO: 134 - protein, 277 aa, Homo sapiens [sequence omitted]

SEQ ID NO: 135 - protein, 277 aa, Homo sapiens
MEAAETEAEAAALEVLAEVAGILEPVGLQEEAELPAKILVEFVVDSQKKDKLLCSQLQVADFLQNILAQEDTAKGLDPLASEDTSRQKAIAAKEQWKELKATYREHVEAIKIGLTKALTQMEEAQRKRTQLREAFEQLQAKKQMAMEKRRAVQNQWQLQQEKHLQHLAEVSAEVRERKTGTQQELDRVFQKLGNLKQQAEQERDKLQRYQTFLQLLYTLQGKLLFPEAEAEAENLPDDKPQQPTRPQEQSTGDTMGRDPGVSFKAVGLQPAGDVNLP

SEQ ID NO: 136 - protein, 277 aa, Homo sapiens; identical to SEQ ID NO: 135

SEQ ID NO: 137 - protein, 230 aa, Homo sapiens
MEAAETEAEAAALEVLAEVAGILEPVGLQEEAELPAKILVEFVVDSQKKDKLLCSQLQVADFLQNILAQEDTAKGLDPLASEDTSRQKAIAAKEQWKELKATYREHVEAIKIGLTKALTQMEEAQRKRTQLREAFEQLQAKKQMAMEKRRAVQNQWQLQQEKHLQHLAEVSAEGKLLFPEAEAEAENLPDDKPQQPTRPQEQSTGDTMGRDPGVSFKAVGLQPAGDVNLP

SEQ ID NO: 138 - protein, 277 aa, Homo sapiens [sequence omitted]

SEQ ID NO: 139 - protein, 277 aa, Homo sapiens [sequence omitted]

SEQ ID NO: 140 - protein, 230 aa, Pan troglodytes
MEAAETEAEAAALEVLAEVAGILEPVGLQEEAELPAKILVEFVVDSQKKDKLLCSQLQVADFLQNILAQEDTAKGLDPLASEDTSRQKAIAAKEQWKELKATYREHVEAIKIGLTKALTQMEEAQRKRTQLQEAFEQLQAKKQMAMEKRRAVQNQWQLQQEKHLQHLAEVSAEGKLLFPEAEAEAENLPDDKPQQPTRPQEQSTGDTMGRDPGVSFKAVGLQPAGDANLP

SEQ ID NO: 141 - protein, 281 aa, Pan troglodytes
MEAAETEAEAAALEVLAEVAGILEPVGLQEEAELPAKILVEFVVDSQKKDKLLCSQLQVADFLQNILAQEDTAKGLDPLASEDTSRQKAIAAKEQWKELKATYREHVEAIKIGLTKALTQMEEAQRKRTQLQEAFEQLQAKKQMAMEKRRAVQNQWQLQQEKHLQHLAEVSAEVRERKTGTQQALEGVFQKLGNLKQQAEQERDKLQRVSCCSLRLRLRQRIFQMINPSSRLDPRSRVQETPWGETLVCPSRLSVYNLLEMQICHDFLEDSSMEKDPRKGL

SEQ ID NO: 142 - protein, 277 aa, Pan troglodytes
MEAAETEAEAAALEVLAEVAGILEPVGLQEEAELPAKILVEFVVDSQKKDKLLCSQLQVADFLQNILAQEDTAKGLDPLASEDTSRQKAIAAKEQWKELKATYREHVEAIKIGLTKALTQMEEAQRKRTQLQEAFEQLQAKKQMAMEKRRAVQNQWQLQQEKHLQHLAEVSAEVRERKTGTQQALEGVFQKLGNLKQQAEQERDKLQRYQTFLQLLYTLQGKLLFPEAEAEAENLPDDKPQQPTRPQEQSTGDTMGRDPGVSFKAVGLQPAGDANLP

SEQ ID NO: 143 - protein, 266 aa, Rattus norvegicus
MADAEKNAVAEKNAVAEENAVAEENAVADKNATKEVLAEAASVLEPVGLPEEAELPAKIMEEFMRNSRKKDKLLCSQLQVVNFLQTFLAQEDNTDQNPDALASEDTSRQKATETKEQWKELKATYMDHVDVIKCALSEALPQVKEAHRKYTELQKAFEQLEAKKRVLEEKLQLAQKQWVLQQKRLQNLTKISAEVKRRRKRALEKLDGSHQELETLKQQAGQEQEKLQRNQSYLQLLCSLQNKLVISESKADDKDVKGPALPPKSP

SEQ ID NO: 144 - protein, 266 aa, Rattus norvegicus; identical to SEQ ID NO: 143

SEQ ID NO: 145 - protein, 266 aa, Rattus norvegicus; identical to SEQ ID NO: 143

SEQ ID NO: 146 - protein, 252 aa, Mus musculus
MADAEKNAVAEKNNAVATKEVLAEAAAILEPVGLQEEAELPAKIMEEFMRNSRKKDKLLCSQLQVVNFLQTFLAQEDTEQSPDALASEDASRQKATETKEQWKDMKATYMDHVDVIKCALSEALPQVKEAHRKYTELQKAFEQLEAKKRVLEEKLQLAQKQWVLQQKRLQNLTKISAEVKRRRKRALEKLDGSHQELETLKQQAGQEQEKLQRNQSYLQLLCSLQNKLVISEGKAEDKDVKGRALTAKSKSP

SEQ ID NO: 147 - protein, 252 aa, Mus musculus; identical to SEQ ID NO: 146

SEQ ID NO: 148 - protein, 252 aa, Mus musculus; identical to SEQ ID NO: 146

SEQ ID NO: 149 - protein, 252 aa, Mus musculus; identical to SEQ ID NO: 146

SEQ ID NO: 150 - protein, 286 aa, Bos taurus
MGAAESEVETAAREVLAKVADIQEPVGFQEEAELPAQILAEFVMDSRKKDKLLCSQLQVVDFLQNFLVQEGTAQDQNPLASEDTSRQKALEAKEQWKELKATYQEHVEVITNSLTEALPKVEEAQIKQAQLQEALKQLQAKKQMAMEKLRIAQKQWQLEQEKHLQNLAEASSEVRERQTGAQQELQRLYQELGTLKQQAGQEKDKLQRHQTFLQLLYTLQGKQLFNEAEAEIPQELDLPKDKLQQVTQPQEQNTQDTMGREADNPQPVGDAGLPWLPGRQQHKEES

SEQ ID NO: 151 - protein, 286 aa, Bos taurus; identical to SEQ ID NO: 150

SEQ ID NO: 152 - protein, 239 aa, Bos taurus
MGAAESEVETAAREVLAKVADILEPVGFQEEAELPAQILAEFVMDSRKKDKLLCSQLQVVDFLQNFLVQEGTAQDQNPLASEDTSRQKALEAKEQWKELKATYQEHVEVITNSLTEALPKVEEAQIKQAQLQEALKQLQAKKQMAMEKLRIAQKQWQLEQEKHLQNLAEASSEGKQLFNEAEAEIPQELDLPKDKLQQVTQPQEQNTQDTMGREADNPQPVGDAGLPWLPGRQQHKEES

SEQ ID NO: 153 - protein, 110 aa, Macaca fascicularis
MEEAQRKRTQLQEAFEQLQAKKQVAMEKRRAAQNQWQLQQEKHLQHLAKVSAEGKLLFPEAEAEAENLPDDKPQQLTRPQEQSTGDTMGRDAGVSFKAVSLQPAGDANLP

SEQ ID NO: 154 - protein, 110 aa, Macaca fascicularis; identical to SEQ ID NO: 153

SEQ ID NO: 155 - protein, 277 aa, Macaca fascicularis
MEAAETEAEAAALEVLAEVAGILEPVGLQEEAELPAKILVEFVVDSQKKDKLLCSQLQVVDFLQNILAQEDTAKGLDPLASEDTSRQKAIAAKEQWKELKATYREHVEAIKIGLTKALTQMEEAQRKRTQLQEAFEQLQAKKQVAMEKRRAAQNQWQLQQEKHLQHLAKVSAEVRERKTGTQQELEGVFQKLGNLKQQAEQEQDKLQRYQTFLQLLYTLQGKLLFPEAEAEAENLPDDKPQQLTRPQEQSTGDTMGRDAGVSFKAVSLQPAGDANLP

SEQ ID NO: 156 - protein, 338 aa, Equus caballus
MEVAETKAEAAALETLAEVADILEPRGLQEEAEVPAQILAEFVTDSRKKDKLLCSQLQVVDFLQNFLAQEDTAQGLDPLASEDTSRQKAIAAKEQWKELKATYQEHVEAITSALTQVLPKVEEAQRKRAQLQEALEQLQAKKQVAAEKLRVAQKQWQLQQEKHLQHLAEVSAEVRERQTGMKQELERLYQELGTLKQEAGQEREKLQRHQTFLQLLYTLQGKLLLPEAEAELPQERDLPEPKSQQVTQSWELNTGDTMERVGDVSSKELDFEDSLKSGTRVGSRVEGGVGLASRVWGCSWVQWGDPRAGYTQRSVGKSPIEVLKQAGRNMFLQFTLIF

SEQ ID NO: 157 - protein, 274 aa, Ornithorhynchus anatinus
MAILASQDGREEAEAEVPAKLLAEFVMDSRKKDKLLCSQLHVVQFLQDFLEHMDAAPGFHISEEEIRKEANEAKQKWKDLKGDYQELVEKIEEAMPRVLQQVEALQKKRELLEEALSEYQMQKHSTEEKLRAVQEQKQRDQNCRAMGVMNEFPLDWKQQEWQLRYLKPSCVCTLAVQPGLLGSSSLEAVRLISVEGLPNPPDLLLYKGPGGVRPCDPNSADPKSLNMGPSLRGAYGKEQQELVIYGAKPSVVFLGQEDWQNGVTIEAPRVSSSG

SEQ ID NO: 158 - protein, 194 aa, Monodelphis domestica
MAADVTARAAAVAEALASAAATLEAPSVQEDVSSALLAEFLKDSRKKEKLLWGQLQVVDALQSFLEHMDEAVNPEEEIRAEVSAAHRLWKDLKAEYLKQTEAVEAALLQALVQLEAGQRKQLLLRSTLQQIQTKGRALEEWRSRAQTWRRQEQEKRRQELTARAQAQRERLENGGQQQEQVLMLQGQETQSAQR

SEQ ID NO: 159 - protein, 286 aa, Canis familiaris
MAEAEVGARAQALEALAALGDILEPVGRQEEVELPAQILAEFVMDSRKKDKLLCSQLQVVDFLQNFLAQEGIVQGLDPLASEDTSRQKALAVKEQWKELKATYQEHVEAITGALTQALAKTEEAQSKRVQLQEALEQLQAKKQVAMERARTAQKQWQLQQEKRLQHLAEASAEVRQRQRGAQQELERLRQELGALQQQAGQKRDRLQRHQTFLRLLHILQGEPLLPGAETERPQELGIPEAKPREQNTGDAVGKDRSVPSQADGLQPARGTSSRWFPEGQQHGKGT

SEQ ID NO: 160 - protein, 294 aa, Bos taurus
MEAAETKAEAAAREALAKVADILEPTGLQEEAELPAQILAEFVMDSRKKDKLLCSQLQVVDFLQNFLIQEDTAQGLDPLASEDTSRKRAIEAKEQWKELKATYQEHVEAITSALTQALPKMEEAQKKQAQLQETLEQLQAKKQVAVEKLRIAQKQWQLQQEKHLQHLTKVSAEVKERQMGTQQEFERLYQELGALKQQARQEQDKLQRHQTFLQLLYTLQGKLLFSEAEAEAQIPQELNLPKDKPLQLTQPQEQNPQDIMGRDGSVSSKVDSPQPIGDASLPWLPGAQQHGEGS

SEQ ID NO: 161 - protein, 261 aa, Homo sapiens
MSYTPGVGGDPAQLAQRISSNIQKITQCSVEIQRTLNQLGTPQDSPELRQQLQQKQQYTNQLAKETDKYIKEFGSLPTTPSEQRQRKIQKDRLVAEFTTSLTNFQKVQRQAAEREKEFVARVRASSRVSGSFPEDSSKERNLVSWESQTQPQVQVQDEEITEDDLRLIHERESSIRQLEADIMDINEIFKDLGMMIHEQGDVIDSIEANVENAEVHVQQANQQLSRAADYQRKSRKTLCIIILILVIGVAIISLIIWGLNH

SEQ ID NO: 162 - protein, 160 aa, Homo sapiens
MDKLKKVLSGQDTEDRSGLSEVVEASSLSWSTRIKGFIACFAIGILCSLLGTVLLWVPRKGLHLFAVFYTFGNIASIGSTIFLMGPVKQLKRMFEPTRLIATIMVLLCFALTLCSAFWWHNKGLALIFCILQSLALTWYSLSFIPFARDAVKKCFAVCLA

SEQ ID NO: 163 - protein, 288 aa, Callithrix jacchus
MKDRTQELRTAKDSDDDDDVAVTVDRDRFMDEFFEQVEEIRGFIDKIAENVEEVKRKHSAILASPNPDEKTKEELEELMSDIKKTANKVRSKLKSIEQSIEQEEGLNRSSADLRIRKTQHSTLSRKFVEVMSEYNATQSDYRERCKGRIQRQLEITGRTTTSEELEDMLESGNPAIFASGIIMDSSISKQALSEIETRHSEIIKLENSIRELHDMFMDMAMLVESQGEMIDRIEYNVEHAVDYVERAVSDTKKAVKYQSKARRKKIMIIICCVILGIVIASTVGGIFA

SEQ ID NO: 164 - protein, 210 aa, Pan troglodytes
MSAKSAISKEIFAPLDERMLGAVQVKRRTKKKIPFLATGGQGEYLTYICLSVTNKKPTQASITKVKQFEGSTSFVRRSQWMLEQLRQVNGIDPNGDSAEFDLLFENAFDQWVASTASEKCTFFQILHHTCQRYLTDRKPEFINCQSKIMGGNSILHSAADSVTSAVQKASQALNERGERLGRAEEKTEDLKNSAQQFAETAHKLAMKHKC

SEQ ID NO: 165 - protein, 136 aa, Pan troglodytes
MAGAGSAAVSGAGTPVAGPTGRDLFAEGLLEFLRPAVQQLDSHVHAVRESQVELREQIDNLATELCRINEDQKVALDLDPYVKKLLNARRRVVLVNNILQNAQERLRRLNHSVAKETARRRAMLDSGIYPPGSPGK

SEQ ID NO: 166 - protein, 307 aa, Homo sapiens
MAALAPLPPLPAQFKSIQHHLRTAQEHDKRDPVVAYYCRLYAMQTGMKIDSKTPECRKFLSKLMDQLEALKKQLGDNEAITQEIVGCAHLENYALKMFLYADNEDRAGRFHKNMIKSFYTASLLIDVITVFGELTDENVKHRKYARWKATYIHNCLKNGETPQAGPVGIEEDNDIEENEDAGAASLPTQPTQPSSSSTYDPSNMPSGNYTGIQIPPGAHAPANTPAEVPHSTGVASNTIQPTPQTIPAIDPALFNTISQGDVRLTPEDFARAQKYCKYAGSALQYEDVSTAVQNLQKALKLLTTGRE

SEQ ID NO: 167 - protein, 100 aa, Homo sapiens
MEEASEGGGNDRVRNLQSEVEGVKNIMTQNVERILARGENLEHLRNKTEDLEATSEHFKTTSQKVARKFWWKNVKMIVLICVIVFIIILFIVLFATGAFS

SEQ ID NO: 168 - protein, 141 aa, Homo sapiens
MPPKFKRHLNDDDVTGSVKSERRNLLEDDSDEEEDFFLRGPSGPRFGPRNDKIKHVQNQVDEVIDVMQENITKVIERGERLDELQDKSESLSDNATAFSNRSKQLRRQMWWRGCKIKAIMALVAAILLLVIIILIVMKYRT

SEQ ID NO: 169 - protein, 258 aa, Homo sapiens
MSAYPKSYNPFDDDGEDEGARPAPWRDARDLPDGPDAPADRQQYLRQEVLRRAEATAASTSRSLALMYESEKVGVASSEELARQRGVLERTEKMVDKMDQDLKISQKHINSIKSVFGGLVNYFKSKPVETPPEQNGTLTSQPNNRLKEAISTSKEQEAKYQASHPNLRKLDDTDPVPRGAGSAMSTDAYPKNPHLRAYHQKIDSNLDELSMGLGRLKDIALGMQTEIEEQDDILDRLTTKVDKLDVNIKSTERKVRQL

SEQ ID NO: 170 - protein, 116 aa, Canis familiaris
MSATAATAPPAAPAGEGGPPAPPPNLTSNRRLQQTQAQVDEVVDIMRVNVDKVLERDQKLSELDDRADALQAGASQFETSAAKLKRKYWWKNLKMMIILGVICAIILIIIIVYFSS

SEQ ID NO: 171 - protein, 116 aa, Homo sapiens
MAGIELERCQQQANEVTEIMRNNFGKVLERGVKLAELQQRSDQLLDMSSTFNKTTQNLAQKKCWENIRYRICVGLVVVGVLLIILIVLLVVFLPQSSDSSSAPRTQDAGIASGPGN

SEQ ID NO: 172 - protein, 206 aa, Homo sapiens
MAEDADMRNELEEMQRRADQLADESLESTRRMLQLVEESKDAGIRTLVMLDEQGEQLDRVEEGMNHINQDMKEAEKNLKDLGKCCGLFICPCNKLKSSDAYKKAWGNNQDGVVASQPARVVDEREQMAISGGFIRRVTNDARENEMDENLEQVSGIIGNLRHMALDMGNEIDTQNRQIDRIMEKADSNKTRIDEANQRATKMLGSG

SEQ ID NO: 173 - protein, 206 aa, Mus musculus
MAEDADMRNELEEMQRRADQLADESLESTRRMLQLVEESKDAGIRTLVMLDEQGEQLERIEEGMDQINKDMKEAEKNLTDLGKFCGLCVCPCNKLKSSDAYKKAWGNNQDGVVASQPARVVDEREQMAISGGFIRRVTNDARENEMDENLEQVSGIIGNLRHMALDMGNEIDTQNRQIDRIMEKADSNKTRIDEANQRATKMLGSG

SEQ ID NO: 174 - protein, 220 aa, Homo sapiens
MAILFAVVARGTTILAKHAWCGGNFLEVTEQILAKIPSENNKLTYSHGNYLFHYICQDRIVYLCITDDDFERSRAFNFLNEIKKRFQTTYGSRAQTALPYAMNSEFSSVLAAQLKHHSENKGLDKVMETQAQVDELKGIMVRNIDLVAQRGERLELLIDKTENLVDSSVTFKTTSRNLARAMCMKNLKLTIIIIIVSIVFIYIIVSPLCGGFTWPSCVKK

SEQ ID NO: 175 - protein, 288 aa, Rattus norvegicus
MKDRTQELRSAKDSDDEEEVVHVDRDHFMDEFFEQVEEIRGCIEKLSEDVEQVKKQHSAILAAPNPDEKTKQELEDLTADIKKTANKVRSKLKAIEQSIEQEEGLNRSSADLRIRKTQHSTLSRKFVEVMTEYNATQSKYRDRCKDRIQRQLEITGRTTTNEELEDMLESGKLAIFTDDIKMDSQMTKQALNEIETRHNEIIKLETSIRELHDMFVDMAMLVESQGEMIDRIEYNVEHSVDYVERAVSDTKKAVKYQSKARRKKIMIIICCVVLGVVLASSIGGTLGL

SEQ ID NO: 176 - protein, 302 aa, Homo sapiens
MSEDEEKVKLRRLEPAIQKFIKIVIPTDLERLRKHQINIEKYQRCRIWDKLHEEHINAGRTVQQLRSNIREIEKLCLKVRKDDLVLLKRMIDPVKEEASAATAEFLQLHLESVEELKKQFNDEETLLQPPLTRSMTVGGAFHTTEAEASSQSLTQIYALPEIPQDQNAAESWETLEADLIELSQLVTDFSLLVNSQQEKIDSIADHVNSAAVNVEEGTKNLGKAAKYKLAALPVAGALIGGMVGGPIGLLAGFKVAGIAAALGGGVLGFTGGKLIQRKKQKMMEKLTSSCPDLPSQTDKKCS

SEQ ID NO: 177 - protein, 259 aa, Homo sapiens
MAASRLELNLVRLLSRCEAMAAEKRDPDEWRLEKYVGALEDMLQALKVHASKPASEVINEYSWKVDFLKGMLQAEKLTSSSEKALANQFLAPGRVPTTARERVPATKTVHLQSRARYTSEMRSELLGTDSAEPEMDVRKRTGVAGSQPVSEKQSAAELDLVLQRHQNLQEKLAEEMLGLARSLKTNTLAAQSVIKKDNQTLSHSLKMADQNLEKLKTESERLEQHTQKSVNWLLWAMLIIVCFIFISMILFIRIMPKLK

SEQ ID NO: 178 - protein, 276 aa, Homo sapiens
MSYGPLDMYRNPGPSGPQLRDFSSIIQTCSGNIQRISQATAQIKNLMSQLGTKQDSSKLQENLQQLQHSTNQLAKETNELLKELGSLPLPLSTSEQRQQRLQKERLMNDFSAALNNFQAVQRRVSEKEKESIARARAGSRLSAEERQREEQLVSFDSHEEWNQMQSQEDEVAITEQDLELIKERETAIRQLEADILDVNQIFKDLAMMIHDQGDLIDSIEANVESSEVHVERATEQLQRAAYYQKKSRKKMCILVLVLSVIILILGLIIWLVYKTK

SEQ ID NO: 179 - protein, 592 aa, Homo sapiens
MAPPVAERGLKSVVWQKIKATVFDDCKKEGEWKIMLLDEFTTKLLASCCKMTDLLEEGITVVENIYKNREPVRQMKALYFITPTSKSVDCFLHDFASKSENKYKAAYIYFTDFCPDNLFNKIKASCSKSIRRCKEINISFIPHESQVYTLDVPDAFYYCYSPDPGNAKGKDAIMETMADQIVTVCATLDENPGVRYKSKPLDNASKLAQLVEKKLEDYYKIDEKSLIKGKTHSQLLIIDRGFDPVSTVLHELTFQAMAYDLLPIENDTYKYKTDGKEKEAILEEEDDLWVRIRHRHIAVVLEEIPKLMKEISSTKKATEGKTSLSALTQLMKKMPHFRKQITKQVVHLNLAEDCMNKFKLNIEKLCKTEQDLALGTDAEGQKVKDSMRVLLPVLLNKNHDNCDKIRAILLYIFSINGTTEENLDRLIQNVKIENESDMIRNWSYLGVPIVPQSQQGKPLRKDRSAEETFQLSRWTPFIKDIMEDAIDNRLDSKEWPYCSQCPAVWNGSGAVSARQKPRANYLEDRKNGSKLIVFVIGGITYSEVRCAYEVSQAHKSCEVIIGSTHVLTPKKLLDDIKMLNKPKDKVSLIKDE

SEQ ID NO: 180 - protein, 454 aa, Homo sapiens
MSAGGPCPAAAGGGPGGASCSVGAPGGVSMFRWLEVLEKEFDKAFVDVDLLLGEIDPDQADITYEGRQKMTSLSSCFAQLCHKAQSVSQINHKLEAQLVDLKSELTETQAEKVVLEKEVHDQLLQLHSIQLQLHAKTGQSADSGTIKAKLERELEANKKEKMKEAQLEAEVKLLRKENEALRRHIAVLQAEVYGARLAAKYLDKELAGRVQQIQLLGRDMKGPAHDKLWNQLEAEIHLHRHKTVIRACRGRNDLKRPMQAPPGHDQDSLKKSQGVGPIRKVLLLKEDHEGLGISITGGKEHGVPILISEIHPGQPADRCGGLHVGDAILAVNGVNLRDTKHKEAVTILSQQRGEIEFEVVYVAPEVDSDDENVEYEDESGHRYRLYLDELEGGGNPGASCKDTSGEIKVLQGFNKKAVTDTHENGDLGTASETPLDDGASKLDDLHTLYHKKSY

SEQ ID NO: 181 - protein, 195 aa, Homo sapiens
MDPLFQQTHKQVHEIQSCMGRLETADKQSVHIVENEIQASIDQIFSRLERLEILSSKEPPNKRQNARLRVDQLKYDVQHLQTALRNFQHRRHAREQQERQREELLSRTFTTNDSDTTIPMDESLQFNSSLQKVHNGMDDLILDGHNILDGLRTQRLTLKVGSLLGDREKASCFSLIQQFSNCVYILITCPQIVIF

SEQ ID NO: 182 - protein, 325 aa, Homo sapiens
MATRRLTDAFLLLRNNSIQNRQLLAEQVSSHITSSPLHSRSIAAELDELADDRMALVSGISLDPEAAIGVTKRPPPKWVDGVDEIQYDVGRIKQKMKELASLHDKHLNRPTLDDSSEEEHAIEITTQEITQLFHRCQRAVQALPSRARACSEQEGRLLGNVVASLAQALQELSTSFRHAQSGYLKRMKNREERSQHFFDTSVPLMDDGDDNTLYHRGFTEDQLVLVEQNTLMVEEREREIRQIVQSISDLNEIFRDLGAMIVEQGTVLDRIDYNVEQSCIKTEDGLKQLHKAEQYQKKNRKMLVILILFVIIIVLIVVLVGVKSR

SEQ ID NO: 183 - protein, 118 aa, Homo sapiens
MSAPAQPPAEGTEGTAPGGGPPGPPPNMTSNRRLQQTQAQVEEVVDIIRVNVDKVLERDQKLSELDDRADALQAGASQFESSAAKLKRKYWWKNCKMMIMLGAICAIIVVVIVIYFFT

SEQ ID NO: 184 - protein, 335 aa, Homo sapiens
MAVDITLLFRASVKTVKTRNKALGVAVGGGVDGSRDELFRRSPRPKGDFSSRAREVISHIGKLRDFLLEHRKDYINAYSHTMSEYGRMTDTERDQIDQDAQIFMRTCSEAIQQLRTEAHKEIHSQQVKEHRTAVLDFIEDYLKRVCKLYSEQRAIRVKRVVDKKRLSKLEPEPNTKTRESTSSEKVSQSPSKDSEENPATEERPEKILAETQPELGTWGDGKGEDELSPEEIQMFEQENQRLIGEMNSLFDEVRQIEGRVVEISRLQEIFTEKVLQQEAEIDSIHQLVVGATENIKEGNEDIREAIKNNAGFRVWILFFLVMCSFSLLFLDWYDS

SEQ ID NO: 185 - protein, 287 aa, Homo sapiens
MRDRLPDLTACRKNDDGDTVVVVEKDHFMDDFFHQVEEIRNSIDKITQYVEEVKKNHSIILSAPNPEGKIKEELEDLNKEIKKTANKIRAKLKAIEQSFDQDESGNRTSVDLRIRRTQHSVLSRKFVEAMAEYNEAQTLFRERSKGRIQRQLEITGRTTTDDELEEMLESGKPSIFTSDIISDSQITRQALNEIESRHKDIMKLETSIRELHEMFMDMAMFVETQGEMINNIERNVMNATDYVEHAKEETKKAIKYQSKARRKLMFIIICVIVLLVILGIILATTLS

SEQ ID NO: 186 - protein, 289 aa, Homo sapiens
MKDRLEQLKAKQLTQDDDTDAVEIAIDNTAFMDEFFSEIEETRLNIDKISEHVEEAKKLYSIILSAPIPEPKTKDDLEQLTTEIKKRANNVRNKLKSMEKHIEEDEVRSSADLRIRKSQHSVLSRKFVEVMTKYNEAQVDFRERSKGRIQRQLEITGKKTTDEELEEMLESGNPAIFTSGIIDSQISKQALSEIEGRHKDIVRLESSIKELHDMFMDIAMLVENQGEMLDNIELNVMHTVDHVEKARDETKKAVKYQSQARKKLIIIIVLVVVLLGILALIIGLSVGLN

SEQ ID NO: 187 - protein, 1115 aa, Homo sapiens
MRKFNIRKVLDGLTAGSSSASQQQQQQHPPGNREPEIQETLQSEHFQLCKTVRHGFPYQPSALAFDPVQKILAVGTQTGALRLFGRPGVECYCQHDSGAAVIQLQFLINEGALVSALADDTLHLWNLRQKRPAILHSLKFCRERVTFCHLPFQSKWLYVGTERGNIHIVNVESFTLSGYVIMWNKAIELSSKSHPGPVVHISDNPMDEGKLLIGFESGTVVLWDLKSKKADYRYTYDEAIHSVAWHHEGKQFICSHSDGTLTIWNVRSPAKPVQTITPHGKQLKDGKKPEPCKPILKVEFKTTRSGEPFIILSGGLSYDTVGRRPCLTVMHGKSTAVLEMDYSIVDFLTLCETPYPNDFQEPYAVVVLLEKDLVLIDLAQNGYPIFENPYPLSIHESPVTCCEYFADCPVDLIPALYSVGARQKRQGYSKKEWPISGGNWGLGAQSYPEIIITGHADGSVKFWDASAITLQVLYKLKTSKVFEKSRNKDDRPNTDIVDEDPYAIQIISWCPESRMLCIAGVSAHVIIYRFSKQEVITEVIPMLEVRLLYEINDVETPEGEQPPPLPTPVGGSNPQPIPPQSHPSTSSSSSDGLRDNVPCLKVKNSPLKQSPGYQTELVIQLVWVGGEPPQQITSLAVNSSYGLVVFGNCNGIAMVDYLQKAVLLNLGTIELYGSNDPYRREPRSPRKSRQPSGAGLCDISEGTVVPEDRCKSPTSAKMSRKLSLPTDLKPDLDVKDNSFSRSRSSSVTSIDKESREAISALHFCETFTRKTDSSPSPCLWVGTTLGTVLVIALNLPPGGEQRLLQPVIVSPSGTILRLKGAILRMAFLDTTGCLIPPAYEPWREHNVPEEKDEKEKLKKRRPVSVSPSSSQEISENQYAVICSEKQAKVISLPTQNCAYKQNITETSFVLRGDIVALSNSICLACFCANGHIMTFSLPSLRPLLDVYYLPLTNMRIARTFCFTNNGQALYLVSPTEIQRLTYSQETCENLQEMLGELFTPVETPEAPNRGFFKGLFGGGAQSLDREELFGESSSGKASRSLAQHIPGPGGIEGVKGAASGVVGELARARLALDERGQKLGDLEERTAAMLSSAESFSKHAHEIMLKYKDKKWYQF

SEQ ID NO: 188 - protein, 158 aa, Homo sapiens
MDNLSSEEIQQRAHQITDESLESTRRILGLAIESQDAGIKTITMLDEQKEQLNRIEEGLDQINKDMRETEKTLTELNKCCGLCVCPCNSITNDAREDEMEENLTQVGSILGNLKDMALNIGNEIDAQNPQIKRITDKADTNRDRIDIANARAKKLIDS

SEQ ID NO: 189 - protein, 249 aa, Homo sapiens
MSLEDPFFVVRGEVQKAVNTARGLYQRWCELLQESAAVGREELDWTTNELRNGLRSIEWDLEDLEETIGIVEANPGKFKLPAGDLQERKVFVERMREAVQEMKDHMVSPTAVAFLERNNREILAGKPAAQKSPSDLLDASAVSATSRYIEEQQATQQLIMDEQDQQLEMVSGSIQVLKHMSGRVGEELDEQGIMLDAFAQEMDHTQSRMDGVLRKLAKVSHMTSDRRQWCAIAVLVGVLLLVLILLFSL

SEQ ID NO: 190 - protein, 355 aa, Homo sapiens
MIPRKRYGSKNTDQGVYLGLSKTQVLSPATAGSSSSDIAPLPPPVTLVPPPPDTMSCRDRTQEFLSACKSLQTRQNGIQTNKPALRAVRQRSEFTLMAKRIGKDLSNTFAKLEKLTILAKRKSLFDDKAVEIEELTYIIKQDINSLNKQIAQLQDFVRAKGSQSGRHLQTHSNTIVVSLQSKLASMSNDFKSVLEVRTENLKQQRSRREQFSRAPVSALPLAPNHLGGGAVVLGAESHASKDVAIDMMDSRTSQQLQLIDEQDSYIQSRADTMQNIESTIVELGSIFQQLAHMVKEQEETIQRIDENVLGAQLDVEAAHSEILKYFQSVTSNRWLMVKIFLILIVFFIIFVVFLA

SEQ ID NO: 191 - protein, 462 aa, Homo sapiens
MSAGGPCPAAAGGGPGGASCSVGAPGGVSMFRWLEVLEKEFDKAFVDVDLLLGEIDPDQADITYEGRQKMTSLSSCFAQLCHKAQSVSQINHKLEAQLVDLKSELTETQAEKVVLEKEVHDQLLQLHSIQLQLHAKTGQSADSGTIKAKLSGPSVEELERELEANKKEKMKEAQLEAEVKLLRKENEALRRHIAVLQAEVYGARLAAKYLDKELAGRVQQIQLLGRDMKGPAHDKLWNQLEAEIHLHRHKTVIRACRGRNDLKRPMQAPPGHDQDSLKKSQGVGPIRKVLLLKEDHEGLGISITGGKEHGVPILISEIHPGQPADRCGGLHVGDAILAVNGVNLRDTKHKEAVTILSQQRGEIEFEVVYVAPEVDSDDENVEYEDESGHRYRLYLDELEGGGNPGASCKDTSGEIKVLQGFNKKAVTDTHENGDLGTASETPLDDGASKLDDLHTLYHKKSY

SEQ ID NO: 192 - protein, 212 aa, Homo sapiens
MDPLFQQTHKQVHEIQSCMGRLETADKQSVHIVENEIQASIDQIFSRLERLEILSSKEPPNKRQNARLRVDQLKYDVQHLQTALRNFQHRRHAREQQERQREELLSRTFTTNDSDTTIPMDESLQFNSSLQKVHNGMDDLILDGHNILDGLRTQRLTLKGTQKKILDIANMLGLSNTVMRLIEKRAFQDKYFMIGGMLLTCVVMFLVVQYLT

SEQ ID NO: 193 - protein, 213 aa, Homo sapiens
MDPLFQQTHKQVHEIQSCMGRLETADKQSVHIVENEIQASIDQIFSRLERLEILSSKEPPNKRQNARLRVDQLKYDVQHLQTALRNFQHRRHAREQQERQREELLSRTFTTNDSDTTIPMDESLQFNSSLQKVHNGMDDLILDGHNILDGLRTQRLTLKGTQKKILDIANMLGLSNTVMRLIEKRAFQDKYFMIGTQGSCQTAHFGGRSAGSS

SEQ ID NO: 194 - protein, 255 aa, Homo sapiens
MSMEDPFFVVKGEVQKAVNTAQGLFQRWTELLQDPSTATREEIDWTTNELRNNLRSIEWDLEDLDETISIVEANPRKFNLDATELSIRKAFITSTRQVVRDMKDQMSTSSVQALAERKNRQALLGDSGSQNWSTGTTDKYGRLDRELQRANSHFIEEQQAQQQLIVEQQDEQLELVSGSIGVLKNMSQRIGGELEEQAVMLEDFSHELESTQSRLDNVMKKLAKVSHMTSDRRQWCAIAILFAVLLVVLILFLVL

SEQ ID NO: 195 - protein, 250 aa, Homo sapiens
MAAGTSSYWEDLRKQARQLENELDLKLVSFSKLCTSYSHSSTRDGRRDRYSSDTTPLLNGSSQDRMFETMAIEIEQLLARLTGVNDKMAEYTNSAGVPSLNAALMHTLQRHRDILQDYTHEFHKTKANFMAIRERENLMGSVRKDIESYKSGSGVNNRRTELFLKEHDHLRNSDRLIEETISIAMATKENMTSQRGMLKSIHSKMNTLANRFPAVNSLIQRINLRKRRDSLILGGVIGICTILLLLYAFH

SEQ ID NO: 196 - protein, 294 aa, Homo sapiens
MKDRLQELKQRTKEIELSRDSHVSTTETEEQGVFLQQAVIYEREPVAERHLHEIQKLQESINNLADNVQKFGQQQKSLVASMRRFSLLKRESTITKEIKIQAEYINRSLNDLVKEVKKSEVENGPSSVVTRILKSQHAAMFRHFQQIMFIYNDTIAAKQEKCKTFILRQLEVAGKEMSEEDVNDMLHQGKWEVFNESLLTEINITKAQLSEIEQRHKELVNLENQIKDLRDLFIQISLLVEEQGESINNIEMTVNSTKEYVNNTKEKFGLAVKYKKRNPCRVLCCWCCPCCSSK

SEQ ID NO: 197 - protein, 304 aa, Homo sapiens
MATRRLTDAFLLLRNNSIQNRQLLAEQLADDRMALVSGISLDPEAAIGVTKRPPPKWVDGVDEIQYDVGRIKQKMKELASLHDKHLNRPTLDDSSEEEHAIEITTQEITQLFHRCQRAVQALPSRARACSEQEGRLLGNVVASLAQALQELSTSFRHAQSGYLKRMKNREERSQHFFDTSVPLMDDGDDNTLYHRGFTEDQLVLVEQNTLMVEEREREIRQIVQSISDLNEIFRDLGAMIVEQGTVLDRIDYNVEQSCIKTEDGLKQLHKAEQYQKKNRKMLVILILFVIIIVLIVVLVGVKSR

SEQ ID NO: 198 - protein, 100 aa, Homo sapiens
MSTGPTAATGSNRRLQQTQNQVDEVVDIMRVNVDKVLERDQKLSELDDRADALQAGASQFETSAAKLKRKYWWKNCKMWAIGITVLVIFIIIIIVWVVSS

SEQ ID NO: 199 - protein, 117 aa, Homo sapiens
MSAPAQPPAEGTEGTAPGGGPPGPPPNMTSNRRLQQTQAQVEEVVDIIRVNVDKVLERDQKLSELDDRADALQAGASQFESSAAKLKRKYWWKNCKMMIMLGAICAIIVVVIVSKYR

SEQ ID NO: 200 - protein, 116 aa, Pongo pygmaeus
MSAPAQPPAEGTEGTAPGGGPPGPPPNMTSNRRLQQTQAQVEEVVDIIRVNVDKVLERDQKLSELDDRADALQAGASQFESSAAKLKRKYWWKNCKMMIMLGAICAIIVVVIVRRD

SEQ ID NO: 201 - protein, 494 aa, Homo sapiens
MAMSLPGSRRTSAGSRRRTSPPVSVRDAYGTSSLSSSSNSGSYKGSDSSPTPRRSMKYTLCSDNHGIKPPTPEQYLTPLQQKEVCIRHLKARLKDTQDRLQDRDTEIDDLKTQLSRMQEDWIEEECHRVEAQLALKEARKEIKQLKQVIDTVKNNLIDKDKGLQKYFVDINIQNKKLETLLHSMEVAQNGMAKEDGTGESAGGSPARSLTRSSTYTKLSDPAVCGDRQPGDPSSGSAEDGADSGFAAADDTLSRTDALEASSLLSSGVDCGTEETSLHSSFGLGPRFPASNTYEKLLCGMEAGVQASCMQERAIQTDFVQYQPDLDTILEKVTQAQVCGTDPESGDRCPELDAHPSGPRDPNSAVVVTVGDELEAPEPITRGPTPQRPGANPNPGQSVSVVCPMEEEEEAAVAEKEPKSYWSRHYIVDLLAVVVPAVPTVAWLCRSQRRQGQPIYNISSLLRGCCTVALHSIRRISCRSLSQPSPSPAGGGSQL

SEQ ID NO: 202 - protein, 198 aa, Homo sapiens
MKLYSLSVLYKGEAKVVLLKAAYDVSSFSFFQRSSVQEFMTFTSQLIVERSSKGTRASVKEQDYLCHVYVRNDSLAGVVIADNEYPSRVAFTLLEKVLDEFSKQVDRIDWPVGSPATIHYPALDGHLSRYQNPREADPMTKVQAELDETKIILHNTMESLLERGEKLDDLVSKSEVLGTQSKAFYKTARKQNSCCAIM

SEQ ID NO: 203 - protein, 297 aa, Homo sapiens
MRDRTHELRQGDDSSDEEDKERVALVVHPGTARLGSPDEEFFHKVRTIRQTIVKLGNKVQELEKQQVTILATPLPEESMKQELQNLRDEIKQLGREIRLQLKAIEPQKEEADENYNSVNTRMRKTQHGVLSQQFVELINKCNSMQSEYREKNVERIRRQLKITNAGMVSDEELEQMLDSGQSEVFVSNILKDTQVTRQALNEISARHSEIQQLERSIRELHDIFTFLATEVEMQGEMINRIEKNILSSADYVERGQEHVKTALENQKKARKKKVLIAICVSITVVLLAVIIGVTVVG

SEQ ID NO: 204 - protein, 287 aa, Homo sapiens
MKDRLAELLDLSKQYDQQFPDGDDEFDSPHEDIVFETDHILESLYRDIRDIQDENQLLVADVKRLGKQNARFLTSMRRLSSIKRDTNSIAKAIKARGEVIHCKLRAMKELSEAAEAQHGPHSAVARISRAQYNALTLTFQRAMHDYNQAEMKQRDNCKIRIQRQLEIMGKEVSGDQIEDMFEQGKWDVFSENLLADVKGARAALNEIESRHRELLRLESRIRDVHELFLQMAVLVEKQADTLNVIELNVQKTVDYTGQAKAQVRKAVQYEEKNPCRTLCCFCCPCLK

SEQ ID NO: 205 - protein, 513 aa, Homo sapiens
MSYGSIARGGGLGSRGPLGGPSRQGCQPLECARCWTEYGIRHFPCPSPESKLQNPCVGKDGEGDLGPAGTPIVPRARKRGPGVAPEGSRMPEPTSSPTIGPRKDSAAGPHGRMAGPSATRAKKRKPNFCPQETEVLVSKVSKHHQLLFGTGLLKAEPTRRYRVWSRILQAVNALGYCRRDVVDLKHKWRDLRAVVRRKLGDLRKAAHGPSPGSGKPQALALTPVEQVVAKTFSCQALPSEGFSLEPPRATQVDPCNLQELFQEMSANVFRINSSVTSLERSLQSLGTPSDTQELRDSLHTAQQETNKTIAASASSVKQMAELLRSSCPQERLQQERPQLDRLKTQLSDAIQCYGVVQKKIAEKSRALLPMAQRGSKQSPQAPFAELADDEKVFNGSDNMWQGQEQALLPDITEEDLEAIRLREEAILQMESNLLDVNQIIKDLASMVSEQGEAVDSIEASLEAASSHAEAARQLLAGASRHQLQRHKIKCCFLSAGVTALLVIIIIIATSVRK

SEQ ID NO: 206 - protein, 211 aa, Homo sapiens
MDNLSSEEIQQRAHQITDESLESTRRILGLAIESQDAGIKTITMLDEQKEQLNRIEEGLDQINKDMRETEKTLTELNKCCGLCVCPCNRTKNFESGKAYKTTWGDGGENSPCNVVSKQPGPVTNGQLQQPTTGAASGGYIKRITNDAREDEMEENLTQVGSILGNLKDMALNIGNEIDAQNPQIKRITDKADTNRDRIDIANARAKKLIDS

SEQ ID NO: 207 - protein, 590 aa, Homo sapiens
MSGDYEDDLCRRALILVSDLCARVRDADTNDRCQEFNDRIRGYPRGPDADISVSLLSVIVTFCGIVLLGVSLFVSWKLCWVPWRDKGGSAVGGGPLRKDLGPGVGLAGLVGGGGHHLAAGLGGHPLLGGPHHHAHAAHHPPFAELLEPGSLGGSDTPEPSYLDMDSYPEAAAAAVAAGVKPSQTSPELPSEGGAGSGLLLLPPSGGGLPSAQSHQQVTSLAPTTRYPALPRPLTQQTLTSQPDPSSEERPPALPLPLPGGEEKAKLIGQIKPELYQGTGPGGRRSGGGPGSGEAGTGAPCGRISFALRYLYGSDQLVVRILQALDLPAKDSNGFSDPYVKIYLLPDRKKKFQTKVHRKTLNPVFNETFQFSVPLAELAQRKLHFSVYDFDRFSRHDLIGQVVLDNLLELAEQPPDRPLWRDIVEGGSEKADLGELNFSLCYLPTAGRLTVTIIKASNLKAMDLTGFSDPYVKASLISEGRRLKKRKTSIKKNTLNPTYNEALVFDVAPESVENVGLSIAVVDYDCIGHNEVIGVCRVGPDAADPHGREHWAEMLANPRKPVEHWHQLVEEKTVTSFTKGSKGLSEKENSE

SEQ ID NO: 208 - protein, 232 aa, Homo sapiens
MASSAASSEHFEKLHEIFRGLHEDLQGVPERLLGTAGTEEKKKLIRDFDEKQQEANETLAEMEEELRYAPLSFRNPMMSKLRNYRKDLAKLHREVRSTPLTATPGGRGDMKYGIYAVENEHMNRLQSQRAMLLQGTESLNRATQSIERSHRIATETDQIGSEIIEELGEQRDQLERTKSRLVNTSENLSKSRKILRSMSRKVTTNKLLLSIIILLELAILGGLVYYKFFRSH

SEQ ID NO: 209 - protein, 236 aa, Homo sapiens
MAPDPWFSTYDSTCQIAQEIAEKIQQRNQYERKGEKAPKLTVTIRALLQNLKEKIALLKDLLLRAVSTHQITQLEGDRRQNLLDDLVTRERLLLASFKNEGAEPDLIRSSLMSEEAKRGAPNPWLFEEPEETRGLGFDEIRQQQQKIIQEQDAGLDALSSIISRQKQMGQEIGNELDEQNEIIDDLANLVENTDEKLRNETRRVNMVDRKSASCGMIMVILLLLVAIVVVAVWPTN

SEQ ID NO: 210 - protein, 288 aa, Rattus norvegicus; identical to SEQ ID NO: 175

SEQ ID NO: 211 - protein, 259 aa, Homo sapiens; identical to SEQ ID NO: 177

SEQ ID NO: 212 - protein, 288 aa, Homo sapiens; identical to SEQ ID NO: 175

SEQ ID NO: 213 - protein, 203 aa, Homo sapiens
MSSDFEGYEQDFAVLTAEITSKIARVPRLPPDEKKQMVANVEKQLEEAKELLEQMDLEVREIPPQSRGMYSNRMRSYKQEMGKLETDFKRSRIAYSDEVRNELLGDDGNSSENQRAHLLDNTERLERSSRRLEAGYQIAVETEQIGQEMLENLSHDREKIQRARERLRETDANLGKSSRILTGMLRRGCSVKKQCNLSLAPKA

SEQ ID NO: 214 - protein, 302 aa, Homo sapiens [sequence omitted]

SEQ ID NO: 215 - protein, 287 aa, Homo sapiens; identical to SEQ ID NO: 185

SEQ ID NO: 216 - protein, 297 aa, Homo sapiens; identical to SEQ ID NO: 203

SEQ ID NO: 217 - protein, 134 aa, Homo sapiens
MEFVMKQALGGATKDMGKMLGGDEEKDPDAAKKEEERQEALRQAEEERKAKYAKMEAEREAVRQGIRDKYGIKKKEEREAEAQAAMEANSEGSLTRPKKAIPPGCGDEVEEEDESILDTVIKYLPGPLQDMLKK

SEQ ID NO: 218 - protein, 289 aa, Homo sapiens; identical to SEQ ID NO: 186

SEQ ID NO: 219 - protein, 276 aa, Homo sapiens; identical to SEQ ID NO: 178

SEQ ID NO: 220 - protein, 250 aa, Homo sapiens; identical to SEQ ID NO: 195

SEQ ID NO: 221 - protein, 287 aa, Homo sapiens; identical to SEQ ID NO: 204

SEQ ID NO: 222 - protein, 294 aa, Homo sapiens; identical to SEQ ID NO: 196

SEQ ID NO: 223 - protein, 211 aa, Homo sapiens; identical to SEQ ID NO: 206

SEQ ID NO: 224 - protein, 258 aa, Homo sapiens; identical to SEQ ID NO: 169

SEQ ID NO: 225 - protein, 236 aa, Homo sapiens; identical to SEQ ID NO: 209

SEQ ID NO: 226 - protein, 261 aa, Homo sapiens; identical to SEQ ID NO: 161

SEQ ID NO: 227 - protein, 206 aa, Homo sapiens; identical to SEQ ID NO: 172

SEQ ID NO: 228 - protein, 513 aa, Homo sapiens
MSYGSIARGGGLGSRGPFGGPSRQGCQPLECARCWTEYGIRHFPCPSPESKLQNRCVGKDGEGDLGPAGTPIVPRARKRGPGVAPEGSRMPEPTSSPTIGPRKDSAAGPHGRMAGPSTTRAKKRKPNFCPQETEVLVSKVSKHHQLLFGTGLLKAEPTRRYRVWSRILQAVNALGYCRRDVVDLKHKWRDLRAVVRRKLGDLRKAAHGPSPGSGKPQALALTPVEQVVAKTFSCQALPSEGFSLEPPRATQVDPCNLQELFQEMSANVFRINSSVTSLERSLQSLGTPSDTQELRDSLHTAQQETNKTIAASASSVKQMAELLRSSCPQERLQQERPQLDRLKTQLSDAIQCYGVVQKKIAEKSRALLPMAQRGSKQSPQAPFAELADDEKVFNGSDNMWQGQEQALLPDITEEDLEAIRLREEAILQMESNLLDVNQIIKDLASMVSEQGEAVDSIEASLEAASSHAEAARQLLAGASRHQLQRHKIKCCFLSAGVTALLVIIIIIATSVRK

SEQ ID NO: 229 - protein, 288 aa, Homo sapiens; identical to SEQ ID NO: 163

SEQ ID NO: 230 - protein, 355 aa, Homo sapiens; identical to SEQ ID NO: 190

SEQ ID NO: 231 - protein, 258 aa, Homo sapiens; identical to SEQ ID NO: 169

SEQ ID NO: 232 - protein, 200 aa, Homo sapiens
MSLEDPFFVVRGEVQKAVNTARGLYQRWCELLQESAAVGREELDWTTNELRNGLRSIEWDLEDLEETIGIVEANPGKPAAQKSPSDLLDASAVSATSRYIEEQQATQQLIMDEQDQQLEMVSGSIQVLKHMSGRVGEELDEQGIMLDAFAQEMDHTQSRMDGVLRKLAKVSHMTSDRRQWCAIAVLVGVLLLVLILLFSL

SEQ ID NO: 233 - protein, 294 aa, Homo sapiens; identical to SEQ ID NO: 196

SEQ ID NO: 234 - protein, 198 aa, Homo sapiens
MKLYSLSVLYKGEAKVVLLKAAYDVSSFSFFQRSSVQEFMTFTSQLIVERSSKGTRASVKEQDYLCHVYVRNDSLAGVVIADNEYPSRVAFTLLEKVLDEFSKQVDRIDWPVGSPATIHYPALDGHLSRYQNPREADLMTKVQAELDETKIILHNTMESLLERGEKLDDLVSKSEVLGTQSKAFYKTARKQNSCCAIM

SEQ ID NO: 235 - protein, 279 aa, Homo sapiens [sequence omitted]

SEQ ID NO: 236 - protein, 297 aa, Homo sapiens; identical to SEQ ID NO: 203

SEQ ID NO: 237 - protein, 255 aa, Homo sapiens; identical to SEQ ID NO: 194

SEQ ID NO: 238 - protein, 289 aa, Homo sapiens; identical to SEQ ID NO: 186

SEQ ID NO: 239 - protein, 246 aa, Homo sapiens
MSLEDPFFVVRGEVQKAVNTARGLYQRWCELLQESAAVGREELDWTTNELRNGLRSIEWDLEDLEETIGIVEANPGKFKLPAGDLQERKVFVERMREAVQEMKDHMVSPTAVAFLERNNREILAGKPAAQKSPSDLLDASAVSATSRYIEEQQATQQLIMDEQDQQLEMVSGSIQVLKHMSGRVGEELDEQGIMLDAFAQEMDHTQSRMDGVLRKLAKVSHMTSGESPQGRGQSWWGQVVGGTLSP

SEQ ID NO: 240 - protein, 260 aa, Homo sapiens
MKDRTQELRTAKDSDDDDDVAVTVDRDRFMDEFFEQVEEIRGFIDKIAENVEEVKRKHSAILASPNPDEKTKEELEELMSDIKKTANKVRSKLKSIEQSIEQEEGLNRSSADLRIRKTQHSTLSRKFVEVMSEYNATQSDYRERCKGRIQRQLEITGRTTTSEELEDMLESGNPAIFASGIIMDSSISKQALSEIETRHSEIIKLENSIRELHDMFMDMAMLVESQPQGAFLKSCPEPQPNPEEGALWSSGAPGPAGRDD

SEQ ID NO: 241 - protein, 236 aa, Homo sapiens; identical to SEQ ID NO: 209

SEQ ID NO: 242 - protein, 198 aa, Homo sapiens; identical to SEQ ID NO: 202

SEQ ID NO: 243 - protein, 136 aa, Homo sapiens; identical to SEQ ID NO: 165

SEQ ID NO: 244 - protein, 211 aa, Homo sapiens; identical to SEQ ID NO: 206

SEQ ID NO: 245 - protein, 158 aa, Homo sapiens; identical to SEQ ID NO: 188

SEQ ID NO: 246 - protein, 100 aa, Homo sapiens; identical to SEQ ID NO: 198

SEQ ID NO: 247 - protein, 202 aa, Homo sapiens
MATRRLTDAFLLLRNNSIQNRQLLAEQELDELADDRMALVSGISLDPEAAIGVTKRPPPKWVDGVDEIQYDVGRIKQKMKELASLHDKHLNRPTLDDSSEEEHAIEITTQEITQLFHRCQRAVQALPSRARACSEQEGRLLGNVVASLAQALQELSTSFRHAQSGYLKRMKNREERSQHFFDTSVPLMDDGDDNTLYHRRTS

SEQ ID NO: 248 - protein, 260 aa, Homo sapiens
MAILFAVVARGTTILAKHAWCGGNFLEVTEQILAKIPSENNKLTYSHGNYLFHYICQDRIVYLCITDDDFERSRAFNFLNEIKKRFQTTYGSRAQTALPYAMNSEFSSVLAAQLKHHSENKGLDKVMETQAQVDELKGIMVRNIVCHLQNYQQKSCSSHVYEEPQAHYYHHHRINCVHLYHCFTSLWWIYMAKLCEEIGKKKLPLTKDMREQGVKSNPCDSSLSHTDRWYLPVSSTLFSLFKILFHASRFIFVLSTSLFL

SEQ ID NO: 249 - protein, 335 aa, Homo sapiens; identical to SEQ ID NO: 184

SEQ ID NO: 250 - protein, 538 aa, Homo sapiens
MPGSGPSERMTWPGPALSAGPPTRPLSSAPGIPPIPPLTRTHSLMAMSLPGSRRTSAGSRRRTSPPVSVRDAYGTSSLSSSSNSGSYKGSDSSPTPRRSMKYTLCSDNHGIKPPTPEQYLTPLQQKEVCIRHLKARLKDTQDRLQDRDTEIDDLKTQLSRMQEDWIEEECHRVEAQLALKEARKEIKQLKQVIDTVKNNLIDKDKGLQKYFVDINIQNKKLETLLHSMEVAQNGMAKEDGTGESAGGSPARSLTRSSTYTKLSDPAVCGDRQPGDPSSGSAEDGADSGFAAADDTLSRTDALEASSLLSSGVDCGTEETSLHSSFGLGPRFPASNTYEKLLCGMEAGVQASCMQERAIQTDFVQYQPDLDTILEKVTQAQVCGTDPESGDRCPELDAHPSGPRDPNSAVVVTVGDELEAPEPITRGPTPQRPGANPNPGQSVSVVCPMEEEEEAAVAEKEPKSYWSRHYIVDLLAVVVPAVPTVAWLCRSQRRQGQPIYNISSLLRGCCTVALHSIRRISCRSLSQPSPSPAGGGSQL

SEQ ID NO: 251 - protein, 136 aa, Homo sapiens; identical to SEQ ID NO: 165

SEQ ID NO: 252 - protein, 592 aa, Homo sapiens; identical to SEQ ID NO: 179

SEQ ID NO: 253 - protein, 250 aa, Homo sapiens; identical to SEQ ID NO: 195

SEQ ID NO: 254 - protein, 287 aa, Homo sapiens [sequence omitted]

SEQ ID NO: 255 - protein, 301 aa, Homo sapiens
MSCRDRTQEFLSACKSLQTRQNGIQTNKPALRAVRQRSEFTLMAKRIGKDLSNTFAKLEKLTILAKRKSLFDDKAVEIEELTYIIKQDINSLNKQIAQLQDFVRAKGSQSGRHLQTHSNTIVVSLQSKLASMSNDFKSVLEVRTENLKQQRSRREQFSRAPVSALPLAPNHLGGGAVVLGAESHASKDVAIDMMDSRTSQQLQLIDEQDSYIQSRADTMQNIESTIVELGSIFQQLAHMVKEQEETIQRIDENVLGAQLDVEAAHSEILKYFQSVTSNRWLMVKIFLILIVFFIIFVVFLA

SEQ ID NO: 256 - protein, 261 aa, Homo sapiens
MSYTPGVGGDPTQLAQRISSNIQKITQCSVEIQRTLNQLGTPQDSPELRQQLQQKQQYTNQLAKETDKYIKEFGSLPTTPSEQRQRKIQKDRLVAEFTTSLTNFQKVQRQAAEREKEFVARVRASSRVSGSFPEDSSKERNLVSWESQTQPQVQVQDEEITEDDLRLIHERESSIRQLEADIMDINEIFKDLGMMIHEQGDVIDSIEANVENAEVHVQQANQQLSRAADYQRKSRKTLCIIILILVIGVAIISLIIWGLNH

SEQ ID NO: 257 - protein, 141 aa, Homo sapiens
MPPKFKRHLNDDDVTGSVKSERRNLLEDDSDEEEDFFLRGPSGPRFGPRNDKIKHVQNQVDEVIDVMPENITKVIERGERLDELQDKSESLSDNATAFSNRSKQLRRQMWWRGCKIKAIMALVAAILLLVIIILIVMKYRT

SEQ ID NO: 258 - protein, 307 aa, Homo sapiens [sequence omitted]

SEQ ID NO: 259 - protein, 249 aa, Homo sapiens; identical to SEQ ID NO: 189

SEQ ID NO: 260 - protein, 297 aa, Homo sapiens; identical to SEQ ID NO: 203

SEQ ID NO: 261 - protein, 212 aa, Homo sapiens [sequence omitted]

SEQ ID NO: 262 - protein, 289 aa, Homo sapiens [sequence omitted]

SEQ ID NO: 263 - protein, 297 aa, Homo sapiens
MRDRTHELRQGDDSSDEEDKERVALVVHPGTARLGSPDEEFFHKVRTIRQTIVKLGNKVQELEKQQVTILATPLPEESMKQELQNLRDEIKQLGREIRLQLKAIEPQKEEADENYNSVNTRMRKTQHGVLSQQFVELINKCNSMQSEYREKNVERIRRQLKITNAGMVSDEELDQMLDSGQSEVFVSNILKDTQVTRQALNEISARHSEIQQLERSIRELHDIFTFLATEVEMQGEMINRIEKNILSSADYVERGQEHVKTALENQKKVRKKKVLIAICVSITVVLLAVIIGVTVVG

1. A method of treating neuropathic pain produced by upregulation of SIP30 expression in a patient in need thereof, comprising administering to said patient an effective amount of an antagonist for SIP30 or SIP30-related protein activity.

2-14. (canceled)

15. A process for screening substances for the ability to interact with SIP30 or an SIP30-related protein comprising:
a) providing a polypeptide comprising a contiguous amino acid sequence of any from the group of SEQ ID 81 through SEQ ID B130;
b) presenting a substance to interact with said amino acid sequence,
c) testing the ability of said substance to interact with said SIP30 or a SIP30-related protein; and
d) determining the interaction affinity of said substance to said protein.

16. A process of claim 15, wherein the step of testing the ability of said substance to interact with a SIP30 or SIP30-related protein further comprise determining the interaction affinity of said substance to said protein.

17. A process of claim 15, wherein the step of testing the ability of said substance to interact with a SIP30 molecule further comprise determining the ability of said substance to activate a SIP30 or SIP30-related macromolecule.

18. A process for screening a substance for the ability to treat neuropathic pain produced in a patient by upregulation of SIP30 expression, comprising:
a) providing a recombinant SIP30 polypeptide encoded by a nucleic acid sequence comprising at least 15 contiguous nucleotides of any from the group of SEQ ID A1 through SEQ ID A130;
b) presenting a substance to interact with said amino acid sequence;
c) contacting said substance with said recombinant SIP30 polypeptide; and
d) detecting the ability of said substance to bind to said recombinant SIP30 polypeptide.

19. The process of claim 18, wherein the nucleic acid sequence comprises at least 20 contiguous nucleotides of any from the group of SEQ ID A1 through SEQ ID A130.

20-21. (canceled)

22. The process of claim 18, wherein the nucleic acid sequence comprises at least 100 contiguous nucleotides of any from the group of SEQ ID A1 through SEQ ID A 130.

23. The process of claim 18, wherein the nucleic acid sequence comprises the nucleotide sequence of any from the group of SEQ ID A1 through SEQ ID A130.

24. The process claim 18, wherein detecting the ability of said substance to interact with an SIP30 poly-peptide involves measuring (i) the ability of said recombinant polypeptide to interact with said substance; (ii) the ability of said substance to activate ion channels in a cell membrane; or (iii) the ability of said substance to modulate channels in the cell membrane of part (ii).

25. The process of claim 18, wherein said recombinant SIP30 polypeptide is chimeric.

26. A process for screening a substance for the ability to bind to SIP30 comprising:
a) expressing in cells a recombinant SIP30 polypeptide encoded by a nucleic acid sequence comprising at least 25 contiguous bases of any from the group of SEQ ID A1 through SEQ ID A130;
b) detecting the upregulation of SIP30 polypeptide;
c) contacting said substance with said recombinant SIP30 polypeptide; and
d) detecting the ability of said substance to interact with said recombinant SIP30 polypeptide.

27. The process of claim 26, wherein the nucleic acid sequence comprises at least 40 contiguous nucleotides of any from the group of SEQ ID A1 through SEQ ID A130.

28-30. (canceled)

31. The process of claim 26, wherein the nucleic acid sequence comprises at least 100 contiguous nucleotides of any from the group of SEQ ID A1 through SEQ ID A 130.

32. The process of claim 26, wherein the nucleic acid sequence comprises the nucleotide sequence of any from the group of SEQ ID A1 through SEQ ID A130.

33. A screening method for determining the efficacy of a substance for treatment of neuropathic pain, comprising:
a. providing a sample containing at least a portion of SIP30 or SIP30 protein;
b. adding at least a portion of said SIP30 or SIP30 protein to the sample; adding a test compound to at least a first portion of the sample; and
c. comparing at least one parameter from at least the first portion of the sample with the at least one parameter from at least a second portion of the sample, wherein at least the second portion of the sample does not include the test compound.

34. A kit comprising: at least a portion of SIP30 and/or SIP30 protein, at least the portion of SIP30 being capable of binding at least a portion of SNAP25; and at least the portion of SNAP25 being capable of binding at least the portion of said SIP30.

35. A kit for screening for compounds reducing an amount of SNAP25, comprising: (a) a nucleotide sequence regulating transcription of SIP30 operably connected to a nucleic acid sequence encoding a reporter protein and (b) at least one cell expressing SIP30 and SNAP 25.

36. (canceled)

37. A kit of claim 35 further comprising a means of delivering the nucleotide sequence into a cell expressing SIP30 and SNAP 25.

38. A kit of claim 35, wherein said cell is a neuron.

39. A kit of claim 35 wherein the reporter protein is selected from firefly luciferase, renilla luciferase, GFP, beta galactosidase and CAT.
